United States Patent Application Publication US 2024/0218339 A1 - sequence listing, part 2

SEQ ID NO: 1623 - protein, 1319 aa, unidentified
  REGION 1..1319: note = Description of Unknown: uncultivated organism sequence
  REGION 1..1319: note = Category: MG75 effectors
  REGION 1..1319: note = Description: MG75-109 effector
MAKIFEDFKRLYPLSKTLRFDAKPVGATLDNIVKSGLLEEDEHRAASYVRVKKLIDEYHKVFIDRVLDNGCLPLENKGENNSLAEYYDSYVSKSQNEDAKKAFEENQQNLRSIIAKKLTGDKAYANLFGKNLIESYKDKKDKKKIIDSDLIQFINTADSTQLDSMTQVEAKELVKEFWGFVTYFYGFFDNRKNMYTAEKKSTGIAYRLINENLPKFIDNMEAFKKVIARPEIQANMEELYSDFSEYLNVESIQEMFQLDYYDMLLTQKQIDVYNAIIGGKTDDEHDVKIKGINEYINLYNQQHKDTRLPKLKALFKQILSDRNAISWLPEEFNSDQEVLNAIKDCYERLSENVLGDKVLKSLLGSLADYSLEGIFIRNDLQLTDVSQKMFGNWGVIQNAIMQNIKHVAPARKHKESEEEYEKRIAGIFKKADSFSISYLNDCLNEADPNNAYFVENYFATFGAVNTPTMQRENLFALVQNKYTEVAALLHSDYPTAKHLAQDKANVAKIKALLDAIKSLQHFVKPLLGKGDESDKDERFYGELASLWAELETVTPLYNMIRNYMTRKPYSQKKIKLNFENPQLLDGWDANKEKDYATIILRRNGLYYLAIMGKDSKNLLGKAMPSDGECYEKMVYKQFDISKQLPKCTTELKHVRKALVEDAKRSCLLSDFNNWNKPLNVTRKLWELNNFVWDKKKEDWVLRKKDNETRPKKFHKKYLELTSDKKGYNQAKNDWIKFIKEFLSSYKKVEAYDIHYKKRYNSVDELYKQLNGDLYAISFTYVSASFIEQLVSEGKMYLFQIYNKDFSEYSKGTPNMHTLYWKALFDERNLADVVYKLNGQAEMFYRKKSLENTHPTHPANHPILNKNKDNKKKESLFDYDLIKDRRYTVDKFMFHVPITMNFKSSGSENINQDVKAYLRHADDMHIIGIDRGERHLLYLVVIDLQGNIKEQYSLNEIVNEYNGNTYHTNYHDLLDVREEERLKARQSWQTIENIKELKEGYLSQVIHKITQLMVKYHAIVVLEDLNMGFMRGRQKVEKQVYQKFEKMLIDKLNYLVDKKADASVSGGLLNAYQLTSKFDSFQKMGKQSGFLFYIPAWNTSKIDPVTGFVNLLDTRYQNVEKAKVFFSKFDAIRYNKDKDWFEFNLDYDKFGKKAEGTRTKWALCTRGMRIDTFRNKEKNSQWDNQEVDLTAEMKSLLEHYYIDIHGNLKDAISAQTDKTFFTGLLHILKLTLQMRNSITGTETDYLVSPVADENGIFYDSRSCGDELPENADANGAYNIARKGLMMIEQIKDAKDLNNLKFDISNKAWLNFAQQKPYKNG

SEQ ID NO: 1624 - protein, 807 aa, unidentified
  REGION 1..807: note = Description of Unknown: uncultivated organism sequence
  REGION 1..807: note = Category: MG75 effectors
  REGION 1..807: note = Description: MG75-110 effector
METFSGFTNLYPLSKTLRFRLIPVGETLKHFIDSGILEEDQHRAESYVKVKAIIDDYHRAYIENSLSGFELPLESTGKFNSLEEYYLYHNIRNKTEEIQNLSSKVRTNLRKQVVVQLTKNEIFKRIDKKELIQSDLIDFVKNEPDANEKIALISEFRNFTVYFKGFHENRRNMYSDEEKSTSIAFRLIHENLPKFIDNMEVFAKIQNTSISENFDAIQKELCPELVTLCEMFKLGYFNKTLSQKQIDAYNTVIGGKTTSEGKKIKGLNEYINLYNQQHKQEKLPKMKLLFKQILSDRESASWLPEKFENDSQVVGAMVNFWNTIHDTVLAEGGLKTIIASLGSYGLEGIFLKNDLQLTDISQKATGSWSKISSEIKQKIEVMNPQKKKESYESYQERIDKLFKSYKSFSLAFINECLRGEYKIEDYFLKLGAVNSSSLQKENHFSHILNAYTDVKEAIGFYSESTDTKLIQDNDSIQKIKQFLDAVKDLQAYVKPLLGNGDETGKDERFYGDLIEYWSLLDLITPLYNMVRNYVTQKPYSVDKIKINFQNPTLLNGWDLNKETDNTSVILRRDGKYYLAIMNNKSRKVFLKYPSGTDGNCYEKMEYKLLPGANKMLPKVFFSKSRINEFMPNERLLSNYEKGTHKKSGICFSLDDCHTLIDFFKKSLDKHEDWKNFGFKFSDTSTYEDMSGFYKEVENQGYKLSFKPIDATYVDQLVDEGKIFLFQIYNKDFSEHSKGTPNMHTLYWKMLFDETNLGDVVYKLNGEAEVFFRKASINVSHPTHPANIPIKKKNLKHKEMKKEFLNMT

SEQ ID NO: 1625 - protein, 347 aa, unidentified
  REGION 1..347: note = Description of Unknown: uncultivated organism sequence
  REGION 1..347: note = Category: MG75 effectors
  REGION 1..347: note = Description: MG75-111 effector
MLNVKENERKQARQSWQSIANIKDLKEGYLSQVIHKISELMVKYNAIVVLEDLNAGFMRGRQKVEKQVYQKFEKKLIEKLNYLVFKKQSSDLPGGLMHAYQLANKFESFNTLGKQSGFLFYIPAWNTSKMDPVTGFVNLFDVKYESVDKAKSFFSKFDSIRYNVERDMFEWKFNYGEFTKKAEGTKTDWTVCSYGNRIITFRNPDKNSQWDNKEINLTENIKLLFERFGIDLSSNLKDEIMQRTEKEFFIELISLFKLVLQMRNSWTGTDIDYLVSPVCNENGEFFDSRNVDETLPQNADANGAYNIARKGMILLDKIKKSNGEKKLALSITNREWLSFAQGCCKNG

SEQ ID NO: 1626 - protein, 1125 aa, unidentified
  REGION 1..1125: note = Description of Unknown: uncultivated organism sequence
  REGION 1..1125: note = Category: MG75 effectors
  REGION 1..1125: note = Description: MG75-112 effector
MIQFINTAEPSQLDSMSQDEAKELVKEFWGFTTYFVGFFDNRKNMYTSEEKSTGIAYRLVNENLPKFIDNMEAFKKAIAKPEIQANMEELYSNFAEYLNVESIQEMFQLDYYNMLLTQKQIDVYNAIIGGKTDEEHDVKIKGINEYINLYNQQHKDEKLPKLKALFKQILSDRNAISWLPEEFNSDQEVLNAIDDCYKRLSENVLGDKVLKSLLCSLDDYNLDGIFVRNDLQLTDISQKMFGNWSVIQNAIMQNIKNVAPARKRKESEEDYEKRISDIFKKADSFSIQYINDCLNEMDNNNLHAVDGYFATLGAVNTPTMQRENLFALIQNAYTDISNLLETPYPENKNLAQDKTNVAKVKALLDAIKSLQHFVKPLLGKGDESDKDERFYGELASLWTELDTVTPLYNMIRNYMTRKPYSEKKIKLNFENPQLLGGWDANKEKDYATIILRRNGMYYLAIMDKDSKKLLGKTMPSDGECYEKMVYKLLPGANKMLPKVFFAKSRINDFKPSKLIVENYNNGTHKKGKNFNINDCHNLIDYFKQSIDKHEDWSKFGFNFSDTSTYEDLSGFYREVEQQGYKLSFTNVSVSFIDKLVDEGKMYLFQIYNKDFSDFSKGTPNMHTLYWKALFDERNLADVVYKLNGQAEMFYRKKSINNTHPTHPANNPIQNKNKDNKKKESVFEYDLIKDRRYTVDKFLFHVPITMNFKSVGSENINQQVREYLQQADDTHIIGIDRGERHLLYLVVIDMQGNIKEQFTLNEIVNEYNGNTYRTNYHDLLDTREEERLTARQSWQTIENIKELKEGYLSQVVHKITQLMVKYHAVVVLEDLNKGFMRGRQKVEKQVYQKFEKMLIDKLNYLVDKKADAAQSGGLLNAYQLTSKFDSFQKLGKQSGFLFYIPAWNTSKIDPVTGFVNLLDTRYQNTEKAKAFFSRFDAIRYNANKDWFEFYLDYDKFCTKAEGTRTRWTLCTQGSRISTFRNAEKNSQWDNLEVDLTREMKSLFEHYHINICGNLKEEICLQTDKAFFTGLLHMLKLTLQMRNSITGTETDYLISPVADENGTFYDSRSCGDTLPKNADANGAYNIARKGLMFIGQIKETKDLANFKYDISNKAWLNFAQQKPYKNE

SEQ ID NO: 1627 - protein, 1254 aa, unidentified
  REGION 1..1254: note = Description of Unknown: uncultivated organism sequence
  REGION 1..1254: note = Category: MG75 effectors
  REGION 1..1254: note = Description: MG75-113 effector
MKFEDFTGLYPVSKTLRFEAKPVGATLENIIKSGVLEDDAHRARSYKKVKKLIDEYHKVFIDSVMSKFKFKEEILEDICSLYAAKSMDDKSKDRFVKLQGEMRKDVSVAFASDDRYKTINKKELVKEDLFEFVSHADNGQLAGLTKEEAEELILEFKDFTTYFSGFHKNRSNMYVADEKTTSVAYRLVNENLPRFLYNVSVFQKVVSVPEFENKIRAIYDSFREYLCVDNLASMFETPYYNDVLSQMQIDIYNSVIGGKTDKDSSTKIQGLNECINLYNQTHRNDKLPKFKILYKQILSDRVAMSWLPDEFSDDKETLEAIRNCYDSLTDHILGERDLKTLLESLGQYDMSGVFIANGPYLADISQKLYGDWRAIEKAIRKQEAVNSPKKAKETEEEYFNRITKHIHNYDSFSIEYLNFCITESYPNDGRRVEDYFATLGAVNTDTSQRENLFSRIDNAYTNVSGLLSSEYPETKKLSQDTENVEKIKDLLDSIKELQRFVKPLMGNGNESDNDNDKRFYGELSPLWDELETFSLLYDKVRNYVTRKPYSQNKIKLNFNNATLFAGWDQNKEKDNACIILRRGGMYYLGIMNKSYRIVFENNFPCDGDCYEKMVYKLLPGANKMLPKVFFSKSRIREFNPSDRILKNYEEGTHKKGPKFKLEDCHELIDFFKASINLHEDWKKFKFKFSDTSSYEDISDFYKEVEQQGYKITFVNVSVSYIDSLVNDGKLYLFQLYNKDFSQYSKGVPNMHTLYWKALFDKANLADVVYKLNGEAELFFRKKSIDMERPTHRANISVANKNIHNIKKESIFKYDLTKDRRYTVDKFLFHVPITMNFRSEGNIAIEQQVRSYLQSAEDTHVIGIDRGERHLLYVSVIDRRGLIKEQFSLNEIINEHNGSTYATNYHDLLDAKESERRKARQSWQTIENIKDLKEGYLSQAVHKIAQLMVKYHAVVVLEDLNVGFMRGRQKVEKQVYQKFEKMLTDKLNYLVDKKLNANDPGGVFHAYQLSSVFKSAEKRGKQSGFIFYIPAWNTSKIDPVTGFVNLFDLKYENIDKAKSFFSKFQIIRYNSERDWFEFIFDYDSFNSKASGTKVGWTLTTHGDRILSFRNSEKNNQWDSRAVILTDEYKALFDKYGIDYNDNLKEAITNQTEKAFFEDLLKCLRLTLQMRNSVIGTDTDFLISPVADNNGVFYDSRICADSLPKNADANGAYNIARKGLMLIDQIKKASDVRNIKFDIANKSWLDFAQKKPYLDE

SEQ ID NO: 1628 - protein, 1269 aa, unidentified
  REGION 1..1269: note = Description of Unknown: uncultivated organism sequence
  REGION 1..1269: note = Category: MG75 effectors
  REGION 1..1269: note = Description: MG75-114 effector
MYFDDFKKLYPLSKTLRFEAKPVGPTFKHIKERGLLEEDEHRAISYVKVKKLIDEYHKAFVGKALNNGCLLYESCGNKNSLIEYYETYKSKEGEARKTMKEIQKNLREMIVGAFEKEEDYANLFKGGLIEPYKSGGKHKEPDILRLINTAGFSQLAGMSQEEAKSLIKEFWRFTTYFVGFFDNRGNMYTSEEKSTGIAYRLINENLPRFIDNMEIFNKIIGKSEIQARVTELYSDFEGYLNVGSIQEMFKLDYYNALLTQKQIDVYNAIISGRTTTGPESKKIKGLNEYINLYNQQHKDGKLPKFKPLFKQILSDREALSWLPDEFVNDQEMLNAIKNCYEKLTGNILGESALKVLLGSLADYDLGGIFVRNDSQLTNISQRMFGRWDAIQNAILQDIRKTAPMRKRRESEEDYENRIDKMFKKADSFSIKYINDCIREIAVDDTLFVEDYFATLGAVNTPTIQRENLFLLVQNAFTDVADLLNSEYSAEKSLAQDSVNVSKIKALLDAIKSLQQFVRPLLGNGDENEKDERFYGEFTSLWAELDEVTLLYDMVRNRMTRKPYSQKKIKLNFANPKLLNGWDENKEKDNSCIILRRDGKYYLAVMDKKSKNLLGKPMPSDGECYEKMVYKLLPGAQKMFPKVFFAKSRIDEFKPSEHILNIYSNGTHKKGNKNFNIEDCHDLIDFFKESIRRHKDWNKFGFEFSDTSTYENVNEFYREADEQGYKLSFVNVSVAYIDKLVNEGEMYLFQIYNKDFSEYSKGTPNMHTLYWKALFDDRNLVDMVYKLNGQAELFYRKKSLDSIRPTHPANQPIKNKNKNNKKKESLFEYDLVKDRRYTVDKFMFHVPITMNFKNAGLEKINQQVREYLQQADDTHIIGIDRGERHLLYLVVIDMHGNIKEQFSLNEIVNECSGNTYHTNYHALLDAREEERLNARRSWQTIESIKELKEGYLSQVIHRITQLMVKYHAIVVLEDLSMGFMRGRQKVEKQVYQKFEKMLIDKLNYLVDKKVDVSQPGGLLNAYQLTNKFESFQSSEKQSGFVFYIPAWNTSKIDPVTGFVNLLDTRYQNVEKARAFFSKFDAIRYNKDKDWFEFGVDYDNFNKKAEGTMTKWTLCTQGVRICTFRNVEKNSQWDTQEVDLTTEMKSLFGQSQIDVNGNLKEAICSQSDKTFFMRLLHLLKLMLQMRNSITGTEIDYLVSPVADGNGNFYDSRKCDSTLPKNADANGAYNIARKGLMLLRQMKTADNLTDVKFDMTNRTWLKFAQQKPYKDE

SEQ ID NO: 1629 - protein, 1252 aa, unidentified
  REGION 1..1252: note = Description of Unknown: uncultivated organism sequence
  REGION 1..1252: note = Category: MG75 effectors
  REGION 1..1252: note = Description: MG75-115 effector
MKFEDFTGLYPVSKTLRFEAKPVGATLENVIKSGVLEDDAHRARSYKKVKKLIDEYHKVFIDSVMSKFKFKEEILEDICSLYAAKSMDDKSKDRFVKLQGEMRKDVSVAFASDDRYKTINKKELVKEDLFEFVSHADNGQLAGLTKEEAEELILEFKDFTTYFSGFHKNRSNMYVADEKTTSVAYRLVNENLPRFLYNVSVFQKVVSVPEFENKIRAIYDSFREYLCVDNLASMFETSYYNDVLSQMQIDIYNSVIGGKTDKDSSTKIQGLNECINLYNQTHRNDKLPKFKILYKQILSDRVAMSWLPDEFSDDKETLEAIRNCYDSLTDHILGERDLKTLLESLGQYDMSGVFIANGPYLADISQKLYGDWRAIEKAIRKQEAVNSPKKAKETEEEYFNRITKHIHNYDSFSIEYLNFCITESYPNDGRRVEDYFATLGAVNTDTSQRENLFSRIDNAYTNVSGLLSSEYPETKKLSQDTENVEKIKDLLDSIKELQRFVKPLMGNGDESDNDKRFYGELSPLWDELETFSLLYDKVRNYVTRKPYSQNKIKLNFNNATLFAGWDQNKEKDNACIILRRGGMYYLGIMNKSYRIVFENNFPCDGDCYEKMVYKLLPGANKMLPKVFFSKSRIREFNPSDRILKNYEEGTHKKGPKFKLEDCHELIDFFKASINLHEDWKKFKFKFSDTSSYEDISDFYKEVEQQGYKITFVNVSVSYIDSLVNDGKLYLFQLYNKDFSQYSKGVPNMHTLYWKALFDKANLADVVYKLNGEAELFFRKKSIDMERPTHRANISVANKNIHNIKKESIFKYDLTKDRRYTVDKFLFHVPITMNFKSEGNIAIEQQVRSYLQSAEDTHVIGIDRGERHLLYVSVIDRRGLIKEQFSLNEIINEHNGSTYATNYHDLLDAKESERRKARQSWQTIENIKDLKEGYLSQAVHKIAQLMVKYHAVVVLEDLNVGFMRGRQKVEKQVYQKFEKMLTDKLNYLVDKKLNANDPGGVFHAYQLSSVFKSAEKRGKQSGFIFYIPAWNTSKIDPVTGFVNLFDLKYENIDKAKSFFSKFQIIRYNSERDWFEFIFDYDSFNSKASGTKVGWTLTTHGDRILSFRNSEKNNQWDSRAVILTDEYKALFDKYGIDYNDNLKEAITNQTEKAFFEDLLKCLRLTLQMRNSVIGTDTDFLISPVADNNGVFYDSRICADSLPKNADANGAYNIARKGLMLIDQIKKASDVRNIKFDIANKSWLDFAQKKPYLDE

SEQ ID NO: 1630 - protein, 762 aa, unidentified
  REGION 1..762: note = Description of Unknown: uncultivated organism sequence
  REGION 1..762: note = Category: MG75 effectors
  REGION 1..762: note = Description: MG75-116 effector
METFSGFTNLYPLSKTLRFRLIPVGETLKHFIGSGILEEDQHRAESYVKVKAIIDDYHRAYIENSLSGFELPLESTGKFNSLEEYYLYHNIRNKTEEIQNLSSKVRTNLRKQVVTQLTKNEIFKRIDKKELIQSDLIDFVKNEPDANEKIALISEFRNFTVYFKGFHENRRNMYSDEEKSTSIAFRLIHENLPKFIDNMEVFAKIQNTSISENFDAIQKELCPELVTLCEMFKLGYFNKTLSQKQIDAYNTVIGGKTTSEGKKIKGLNEYINLYNQQHKQEKLPKMKLLFKQILSDRESASWLPEKFENDSQVVGAMVNFWNTIHDTVLAEGGLKTIIASLGSYGLEGIFLKNDLQLTDISQKATGSWSKISSEIKQKIEVMNPQKKKESYESYQERIDKLFKFYKSFSLAFINECLRGEYKIEDYFLKLGAVNSSSLQKENHFSHILNTYTDVKEVIGFYSESTDTKLIRDNGSIQKIKLFLDAVKDLQAYVKPLLGNGDETGKDERFYGDLIEYWSLLDLITPLYNMVRNYVTQKPYSIDKIKINFQNPTLLNGWDLNKETDNTSVILRRDGKYYLAIMNNKSRKVFLKYPSGTDRNCYEKMEYKLLPGANKMLPKVFFSKSRINEFMPNERLLSNYEKGTHKKSGTCFSLDDCHTLIDFFKKSLDKHEDWKNFGFKFSDTSTYEDMSGFYKEVENQGYKLSFKPIDATYVDQLVDEGNIFYFRFITRIFLSIAKVRLICIPCIGKCYLMKQILGMWYIN

SEQ ID NO: 1631 - protein, 1274 aa, unidentified
  REGION 1..1274: note = Description of Unknown: uncultivated organism sequence
  REGION 1..1274: note = Category: MG75 effectors
  REGION 1..1274: note = Description: MG75-117 effector
MAKNFEDFKRLYPLSKTLRFEAKPIGATLDNIIKSGLLDEDEHRAASYVKMKKLIDEYHKVFIDRVLDNGCLPLEDKGDNNSLAEYYESYVSKAQDEDAIKKFKEIQQNLCSIIAKKLTDDKAYANLFGNKLIESYKDKADKTKIIDSDLIQFINTAESTQLVSMSQDEAKELVKEFWGFTTYFEGFFKNRKNMYTPEEKSTGIAYRLINENLPKFIDNMEAFKKAITRPEIQANMEELYSDFSEYLNVESIQEMFQLDYYNMLLTQKQIDVYNAIIGGKTDDEHDVKIKGINEYINLYNQQHKDDKLPKLKALFKQILSDRNAISWLPEEFNSDQEVLNAIKDCYERLAENVLGDKVLKSLLCSLSDYTLDGIFIRNDLQLTDISQKMFGNWGVIQNAIMQNIKRVAPARKHKESEEDYEKRIAGIFKKADSFSISYINDCLNEADSNNAYFVENYFATFGAVNTPTMQRENLFALVQNAYTEVASLLHSDYPTAKHLAQDKANVAKIKALLDAIKSLQHFVKPLLGKGDESDKDERFYGELASLWAELDTVTPLYNMIRNYITRKPYSQKKIKLNFENPQLLGGWDANKEKDYATIILRRNGLYYLAIMNKESKKLLGKAMPSDGECYEKMVYKLLPGANKMLPKVFFAKSRMEDFKPSKELVEKYNNGTHKKGKNFNIQDCHNLIDYFKQSISKHEDWGKFGFNFSDTSTYEDLSGFYREVEQQGYKLSFARVSVSYINQLVEEGKMYLFQIYNKDFSEYSKGTPNMHTLYWKALFDERNLADVVYKLNGQAEMFYRKKSIENTHPTHPANHPILNKNKDNKKKESLFEYDLIKDRRYTVDKFMFHVPITMNFKSVGSENINQGVKEYLHHADDMHIIGIDRGERHLLYLVVIDLQGNIKEQYSLNEIVNEYNGNTYHTNYHDLLDAREDERLKARQSWQTIENIKELKEGYLSQVIHKITQLMVKYHAIVVLEDLNMGFMRGRQKVEKQVYQKFEKMLIDKLNYLVDKKADASVSGGWLNAYQLTSKFDSFQKLGKQSGFLFYIPAWNTSKIDPVTGFVNLLDARYQNVEKAKAFFSKFDAIRYNKDKDWFEFNLDYDKFGKKAEGTRTKWTLCTRGMRFDTFRNKEKNSQWDNQEVDLTAEMKSLLEHYYIDIHGNLKDAISAQTDKAFFTGLLHILKLTLQMRNSITGTETDYLVSPVADENGIFYDSRSCGEELPENADANGAYNIARKGLMLIEQIKGAEDLGNLKFDISNKAWLNFAQKKPYKNG

SEQ ID NO: 1632 - protein, 1271 aa, unidentified
  REGION 1..1271: note = Description of Unknown: uncultivated organism sequence
  REGION 1..1271: note = Category: MG75 effectors
  REGION 1..1271: note = Description: MG75-118 effector
MEFDDFKRLYPLSKTLRFEAKPIGATLKNIIKSGVLEEDEHRAQSYVKVKKLIDEYHKVFIDRVLNEGCLTIENKGNKDSLEEYYESYMSKSNDENVSKTFKEIQENLRSVIAKKLTDDKAYANLFGKNLIESYKDKEDKNKIIDSDLIQFINTAEPSQIDSMSQDEAKELVKEFWGFTTYFVGFFDNRKNMYTSEEKSTGIAYRLVNENLPKFIDNMEAFKKAIAKPEIQANMEELYSNFAEYLNIESIQEMFQLDYYDMLLTQKQIDVYNAIIGGKTDEDHDVKIKGINEYINLYNQQHKDEKLPKLKALFKQILSDRNAISWLPEEFNSDQEVLDAIKDCYERLSENVLGDKVLKSLLCSLSDYNLNGIFVRNDLQLTDISQKTFGNWSVIQNAIMQNIKNVAPARKRKESEEDYEKRISDIFKKADSFSIQYINDCLNEMDDNNLHAVDGYFATLGAVNTPTMQRENLFALIQNAYTDISDLLDTPYPQNKNLAQDKTNVAKVKVLLDAIKSLQHFVKPLLGMGDESDKDERFYGELASLWTELDTVTPLYNMIRNYMTRKPYSEKKIKLNFENPQLLGGWDANKEKDYATIILRRNGMYYLAIMDKDSKKLLGKTMPSDGECYEKMVYKLLPGANKMLPKVFFAKSRINDFKPSKKIVENYNNGTHKKGKNFNINDCHDLIDYFKQSIDKHEDWSKFGFNFSDTSTYEDLSGFYREVEQQGYKLSFTNISVSFIDKLVDEGKMYLFQIYNKDFSDYSKGTPNMHTLYWKALFDERNLADVVYKLNGQAEMFYRKKSIDYTYPTHPANHPIQNKNKDNKKKESVFEYDLVKDRRYTVDKFLFHVPITINFKSVGSENINQQVREYLQQADDTHIIGIDRGERHLLYLVVIDMQGNIKEQFTLNEIVNEYNGNTYRTNYHDLLDTREEERLTARQSWQTIENIKELKEGYLSQVVHKITQLMVKYHAVVVLEDLNKGFMRGRQKVEKQVYQKFEKMLIDKLNYLVDKKADATQSGGLLNAYQLTSKFDSFQKLGKQSGFLFYIPAWNTSKIDPVTGFVNLLDTRYQNTEKAKAFFSKFDAIRYNADKDWFEFNLDYDKFGTKAEGTRTTWTLCTQGNRICTFRNAEKNSQWDNQEVDLTGELKSLFEHYNINISGNLKEEICSQTDKAFFTGLLHILKLTLQMRNSITGTETDYLVSPVADENGVFYDSRSCGDRLPENADANGAYNIARKGLMLIGQIKGTKDLANFKYDISNKSWLNFAQQKPYKK

SEQ ID NO: 1633 - protein, 1272 aa, unidentified
  REGION 1..1272: note = Description of Unknown: uncultivated organism sequence
  REGION 1..1272: note = Category: MG75 effectors
  REGION 1..1272: note = Description: MG75-119 effector
MKFDDFKKLYSLSKTLRFEAKPVGSTLKNIIESGLLEEDEHRAQSYVKVKKLIDEYHKVFIDRVLNEGCLTIENKGKKDSLEEYYESYMSKSNDENVSKTFKEIQENLRSVIAKKLTDNNAYANLFGNKLIESYKDKDEKNKIIDSDLIQFINTAEPSQLDSMSQDEAKELVKEFWGFTTYFVGFFDNRKNMYTSEEKSTGIAYRLVNENLPKFIDNMEAFKKAIAKPEIQANMEELYSNFAEYLNVESIQEMFQLDYYNMLLTQKQIDVYNAIIGGKTDEEHDVKIKGINEYINLYNQQHKDEKLPKLKALFKQILSDRNAISWLPEEFNSDQEVLNAINDCYKRLSENVLGDKVLKSLLCSLDDYNLDGIFVRNDLQLTDISQKMFGNWSVIQNAIMQNIKNVAPARKRKESEEDYEKRISDIFKKADSFSIQYINDCLNEMDDNNLYAVDGYFATLGAVNTPTMQRENLFALIQNAYTDISNLLETPYPENKNLAQDKTNVAKVKALLDAIKSLQHFVKPLLGKGDESNKDERFYGELASLWTELDTVTPLYNMIRNYMTRKPYSEKKIKLNFENPQLLGGWDANKEKDYATIILRRNGMYYLAIMDKDSKKLLGKTMPSDGECYEKMVYKLLPGANKMLPKVFFAKSRINDFKPSKQIVENYNNGTHKKGKNFNINDCHNLIDYFKQSIDKHEDWSKFGFNFSDTSTYEDLSGFYREVEQQGYKLSFTNVSVSFIDKLVDEGKMYLFQIYNKDFSDFSKGTPNMHTLYWKALFDERNLADVVYKLNGQAEMFYRKKSINNTHPTHPANHPIQNKNKDNKKKESVFEYDLIKDRRYTVDKFLFHVPITMNFKSVGSENINQQVREYLQKADDTHIIGIDRGERHLLYLVVIDMQGNIKEQFTLNEIVNEYNGNTYHTNYHDLLDTREEERLTARQSWQTIENIKELKEGYLSQVIHKITQLMVKYHAVVVLEDLNKGFMRGRQKVEKQVYQKFEKMLIDKLNYLVDKKADAAQSGGLLNAYQLTSKFDSFQKLGKQSGFLFYIPAWNTSKIDPVTGFVNLLDTRYQNTEKAKAFFSRFDAIRYNANKDWFEFYLDYDKFCTKAEGTRTRWTLCTQGSRISTFRNAEKNSQWDNLEVDLTREMKSLFEHYHINICGNLKEEICLQTDKAFFTGLLHMLKLTLQMRNSITGTETDYLISPVADENGTFYDSRSCGDTLPKNADANGAYNIARKGLMFIGQIKETKDLANFKYDISNKAWLNFAQQKPYKNE

SEQ ID NO: 1634 - protein, 880 aa, unidentified
  REGION 1..880: note = Description of Unknown: uncultivated organism sequence
  REGION 1..880: note = Category: MG75 effectors
  REGION 1..880: note = Description: MG75-120 effector
MIQNAIMQNIKRVAPARKHKESEEDYEKRIAGIFKKADSFSISYINDCLNEADPNNAYFVENYFATFGAVNTPTMQRENLFALVQNAYTEVASLLHSYYPAEKKLAQDKANVAKIKALLDAIKSLQHFVKPLLGKGDESDKDERFYGELASLWAELDTVTPLYNMIRNYITRKPYSQKKIKLNFENPQLLGGWDANKEKDYATIILRRNGLYYLAIMDKDSRKLLGKAMPSDGECYEKMVYKLLPGANKMLPKVFFAKSRMDDFKPSKELIEKYNNGTHKKGKNFDIQDCHNLIDYFKQSIDKHEDWSKFGFNFSDTSTYEDLSGFYREVEQQGYKLSFARVSVSYINQLVEEGKMYLFQIYNKDFSEYSKGTPNMHTLYWKALFDERNLADVVYKLNGQAEMFYRKKSIENSHPTHPANHPILNKNKDNKKKESLFDYDLIKDRRYTVDKFMFHVPITMNFKSSSSENINQDVKAYLRHADDMHIIGIDRGERHLLYLVVIDLQGNIKEQYSLNEIVNEYNGNTYHTNYHDLLDVREEERLKARQSWQTIENIKELKEGYLSQVIHKITQLMVKYHAIVVLEDLNMGFMRGRQKVEKQVYQKFEKMLIDKLNYLVDKKADASVSGGLLNAYQLTSKFDSFQKLGKQSGFLFYIPAWNTSKIDPITGFVNLLDTRYQNVEKAKVFFSKFDAIRYNKDKDWFEFNLDYDKFGKKAEGTRTKWILCTRGMRIDTFRNKEKNSQWDNQEVDLTAELKSLLEHYYIDIHGNLKEAISAQTDKAFFTGLLHILKLTLQMRNSITGTETDYLVSPVADENGIFYDSRSCGEQLPENADANGAYNIARKGLMMIEQIKNAEDLGNLKFDISNKAWLNFAQQKPYKNG

SEQ ID NO: 1635 - protein, 1276 aa, unidentified
  REGION 1..1276: note = Description of Unknown: uncultivated organism sequence
  REGION 1..1276: note = Category: MG75 effectors
  REGION 1..1276: note = Description: MG75-121 effector
MAKKFEDFTKLYPLSKTLCFEARPIGATKSNIIKNGLLDEDKHRAESYVKVKKLIDEYHKAFIDRVLADGCLCYKNEGNEDSLEEYYEFYSLSSKDKSDDTRKHFATIQQNLRSKIAETLTKDKAYANLFGNKLIESHKDKEDKNNIIDSDLIQFVSTATPDQLDSQSKDDATKLIKEFWGFTTYFTGFFENRKNMYTSEEKSTGIAYRLINENLPKFIDNMESFKKIMEKPEMSANMEELRANLEEYLNVESISEMFELNYYNMLLTQKQIDVYNAVIGGKTDEEQDIKTKGINEYVNLYNQQHKDAKLPKLKTLFKQILSDRNAISWLPEEFDKDQNVLNAIKDCYVRLTANVLGNNVLNSLLSTLSEYNTESIFIRNDIQLTNISQKMAGSWNYIQDAIKQDIKNVAPARKRKESEEDYEERISKNFKKADSYSIKYIDDCLNRAYKNNTYTVEGYFATLGATNTPSLQRENLFAQIANAYTNISSLLSSDYSAEKNLAQDKENVAKIKTLLDCIKSLQHFVKPLLGKGDESDKDERFYGELSMLWKELDTVTPLYNMVRNYMTRKPYSQKKIKLNFENPQLLGGWDANKEKDYASILLRRDGKYYLGIMDKESKKLLGKSMPSDGACYQKMVYKLLPGANKMLPKVFFAKSRLADFNPSKEIIENYNNGTHKKGKNFNLKDCHALIDYFKESIKKHEDWSKFGFKFSESTTYEDLSGFYHEVEQQGYKLSFTNVSASYIDKMVDEGKMYLFQIYNKDFSEYSKGTPNMHTLYWKALFDERNLADVVYKLNGQAELFYREKSIDCTHPTHPANHPILNKNKDNEKKESIFEYDLIKDRRYTVDKFMFHVPITMNFKSTGADNINQLVREHLKDADAPHIIGIDRGERHLLYLVVIDMHGNIKEQFTLNDIVNEYNGNTYRTNYHDLLDAREDVRLKARQSWQTIENIKELKEGYLSQVIHKITQLMVKYHAIVVLEDLNMGFMRGRQKVEKQVYQKFEKMLIDKLNYYVDKKANAEQAGGLLNAYQLTSKFDSFQKLGKQSGFLLYIPAWNTSKIDPVTGFVNLLDTRYQNVEKAKAFFCKFEAIRYNSNKNWFEFTIDYNNFGQKAEGTRTKWTLCTQGKRIRTFRNPEKNSEWDNQEIDLTAALKNLFAHYHIDINGNIKEAISAQSDKTFFTELLHLLKLTLQMRNSITGTETDYLISPVADDNGYFYDSRTCNDTLPKNADANGAYNIARKGLMLIEQIKKAKDIANIKFDISNKSWLNFAQQKPYKDE

SEQ ID NO: 1636 - protein, 1274 aa, unidentified
  REGION 1..1274: note = Description of Unknown: uncultivated organism sequence
  REGION 1..1274: note = Category: MG75 effectors
  REGION 1..1274: note = Description: MG75-122 effector
MAKNFEDFKRLYPLSKTLRFEAKPIGATLDNIVKSGLLDEDEHRAASYVKVKKLIDEYHKVFIDRVLADGCLPLKNEGHNNSLTEYYDNYVSKSQNEDAKKAFEENQQNLRSIIAKKLTEDKAYANLFGKNLIESYKDKTDKTKIIDSDLIKFINTAESTQLDSMSQDEAKEIVKEFWGFTTYFVGFFDNRKNMYTAEEKSTGIAYRLINENLPKFIDNMEAFKKAIARPEIQANMEELYSNFSEYLNVESIQEMFLLDYYNMLLTQKQIDVYNAIIGGKTDDEHDVKIKGINEYINLYNQQHKDDKLPKLKALFKQILSDRNAISWLPEEFNSDQEVLNAIKDCYERLSENVLGDKVLKSLLGSLADYSLDGIFIRNDLQLTDISQKMFGNWGVIQNAIMQNIKHVAPARKHKESEEDYEKRIAGIFKKADSFSISYINDCLNEADPNNAYFVENYFATFGAVNTPTMQRENLFALVQNAYTEVAALLHSDYPTVKHLAQDKANVAKIKALLDAIKSLQHFVKPLLGKGDESDKDERFYGELASLWAELDTVTPLYNMIRNYMTRKPYSQKKIKLNFENPQLLGGWDANKEKDYATIILRRNGLYYLAIMDKDSRKLLGKAMPSDGECYEKMVYKLLPGANKMLPKVFFAKSRMEDFKPSKELVEKYNNGTHKKGKNFCIQDCHNLIDYFKQSIDKHEDWSKFGFNFSETSTYEDLSGFYREVEQQGYKLSFARVSVSYINQLVEEGKMYLFQIYNKDFSEYSKGTPNMHTLYWKALFDERNLADVVYKLNGQAEMFYRKKSIENTHPTHPANHPILNKNKDNKKKESLFKYDLIKDRRYTVDKFMFHVPITMNFKSSGSENINQDVKAYLRYADDMHIIGIDRGERHLLYLVVIDLQGNIKEQFSLNEIVNDYNGNTYHTNYHDLLDVREDERLKARQSWQTIENIKELKEGYLSQVIHKITQLMVKYHAIVVLEDLNMGFMRGRQKVEKQVYQKFEKMLIEKLNYLVDKKADASVSGGLLNAYQLTSKFDSFQKLGKQSGFLFYIPAWNTSKIDPVTGFVNLLDTRYQNVEKAKSFFSKFDAIRYNKDKDWFEFNLDYDKFGKKAEGTRTKWTLCTRGMRIDTFRNKEKNSQWDNQEVDLTAEMKSLLEHYYIDIHGNLKDAISAQTDKAFFTGLLHILKLTLQMRNSITGTETDYLVSPVVDENGIFYDSRSCGDTLPENADANGAYNIARKGLMMIEQLKDAKDLDNLKFDISNKAWLNFAQQKPYKNG

SEQ ID NO: 1637 - protein, 1252 aa, unidentified
  REGION 1..1252: note = Description of Unknown: uncultivated organism sequence
  REGION 1..1252: note = Category: MG75 effectors
  REGION 1..1252: note = Description: MG75-123 effector
MKFEDFTGLYPVSKTLRFEAKPVGATLENVIKSGVLEDDAHRARSYKKVKKLIDEYHKVFIDSVMSKFKFKEEILEEICSLYAAKSMDDKSKDRFVKLQGEMRKDVSVAFASDDRYKTINKKELVKEDLFEFVSHADNGQLAGLTKEEAEELILEFKDFTTYFSGFHKNRSNMYVADEKTTSVAYRLVNENLPRFLYNVSVFQKVVSVPEFENKIRAIYDSFREYLCVDNLASMFETSYYNDVLSQMQIDIYNSVIGGKTDKDSSTKIQGLNECINLYNQTHRNDKLPKFKILYKQILSDRVAMSWLPDEFSDDKETLEAIRNCYDSLTDHILGERDLKTLLESLGQYDMSGVFIANGPYLADISQKLYGDWRAIEKAIRKQEAVNSPKKAKETEEEYFNRITKHIHNYDSFSIEYLNFCITESYPNDGRRVEDYFATLGAVNTDTSQRENLFSRIDNAYTNVSGLLSSEYPETKKLSQDTENVEKIKDLLDSIKELQRFVKPLMGNGDESDNDKRFYGELSPLWDELETFSLLYDKVRNYVTRKPYSQNKIKLNFNNATLFAGWDQNKEKDNACIILRRGGMYYLGIMNKSYRIVFENNFPCDGDCYEKMVYKLLPGANKMLPKVFFSKSRIREFNPSDRILKNYEEGTHKKGPKFKLEDCHELIDFFKASINLHEDWKKFKFKFSDTSSYEDISDFYKEVEQQGYKITFVNVSVSYIDSLVNDGKLYLFQLYNKDFSQYSKGVPNMHTLYWKALFDKANLADVVYKLNGEAELFFRKKSIDMERPTHRANISVANKNIHNIKKESIFKYDLTKDRRYTVDKFLFHVPITMNFKSEGNIAIEQQVRSYLQSAEDTHVIGIDRGERHLLYVSVIDRRGLIKEQFSLNEIINEHNGSTYATNYHDLLDAKESERRKARQSWQTIENIKDLKEGYLSQAVHKIAQLMVKYHAVVVLEDLNVGFMRGRQKVEKQVYQKFEKMLTDKLNYLVDKKLNANDPGGVFHAYQLSSVFKSAEKRGKQSGFIFYIPAWNTSKIDPVTGFVNLFDLKYENIDKAKSFFSKFQIIRYNSERDWFEFIFDYDSFNSKASGTKVGWTLTTHGDRILSFRNSEKNNQWDSRAVILTDEYKALFDKYGIDYNDNLKEAITNQTEKAFFEDLLKCLRLTLQMRNSVIGTDTDFLISPVADNNGVFYDSRICADSLPKNADANGAYNIARKGLMLIDQIKKASDVRNIKFDIANKSWLDFAQKKPYLDE

SEQ ID NO: 1638 - protein, 1271 aa, unidentified
  REGION 1..1271: note = Description of Unknown: uncultivated organism sequence
  REGION 1..1271: note = Category: MG75 effectors
  REGION 1..1271: note = Description: MG75-124 effector
MEYENFKKIYPLSKTLRFEAKPVGSTLKNFIESGLLEEDEHRAQSYVKVKKLIDEYHKVFIDRVLNDGCLPLENKGNKNSLEEYYESYLSKNRDENANNTFKEIQQNLRSVIAKKLTDDKAYANLFGNKLIESYKDKEDKKKIIDSDLIQFINCANSSQLNGMSEDEAKELVKEFWGFTTYFEGFHTNRKNMYTAEEESTAIAHRLINENLPKFIDNMDVFKKAVAKPEIQANIEELYANFAAYLNVESIQEMFQLDYYNMLLTQKQIDVYNAIIGGKTDEDHDVKIKGINEYINLYNQQHKNEKLPKLKVLFKQILSDRNAISWLPEEFNDDQEVLNAIKDCYERLSENVLGDKVLKSLLCSLGDYNLDGIFVRNDAQLTDISQKMFGDWGVIQNAIIQNIKNVAPARKRKESEEDYEKRISDIFKKADSFSLRYINDCLNEMDEKNPYTVQWYFSTLGAVNTPTMQRENLFALIQNAYTDISDLLNSQYPTDKNLSQDKTNVAKVKALLDAIKSLQHFVKPLLGRGDESDKDERFYGELASLWTELDTVTPLYNMVRNYMTRKPYSEKKIKLNFENPQLLGGWDANKEKDYASIILRRNGLYYLAIMNKESKKLLGKTMPSDGECYEKMVYKLLPGANKMLPKVFFSKSKIDYFKPSKQIVENYNNDTHKKGKNFNINDCHDLIDFFKQSIDIHEDWSKFGFKFSDTSTYKDLSGFYREVEQQGYKLSFTKVSVSFIDKLVDDGKMYLFQIYNKDFSKYSKGTPNMHTLYWKALFDERNLADVVYKLNGQAEMFYRKKSIVYTHPTHPANHPILNKNKENKKKESVFEYDLVKDRRYTVDKFLLHVPITMNFKSVGSENINQQVREYLQQAEDTHIIGIDRGERHLLYLVVIDMQGNIKEQYTLNEIVNEYNGNTYRTNYHDLLNTREEERLTARQSWQTIENIKELKEGYLSQVIHKITQLMVKYHAVVVLEDLNKGFMRGRQKVEKQVYQKFEKMLIDKLNYLVDKKADAAQLGGLLNAYQLTSKFDSFQKLGKQSGFLFYIPAWNTSKIDPVTGFVNLLDTRYQNTEKAKAFFSKFDAIRYNTDKDWFEFYLDYDKFGTKAEGTRTKWTLCTQGCRIRIFRNADKNSQWDNQDVDLTKELKALFEIYHINIGGNLKEGICSQTDKAFFTGLLHILKLTLQMRNSITGTETDYLVSPVADENGVFYDSRSCGDTLPKNADANGAYNIARKGLMLIEQIKETKDLANFKYDISNKAWLNFAQQKPYEK

SEQ ID NO: 1639 - protein, 1080 aa, unidentified
  REGION 1..1080: note = Description of Unknown: uncultivated organism sequence
  REGION 1..1080: note = Category: MG75 effectors
  REGION 1..1080: note = Description: MG75-125 effector
MYTSEEKSTGIAYRLINENLPKFIDNMEAFKKAIAIPEIQANIGELYSDFSEYLNVESIQEMFQLDYYNMLLTQKQIDVYNAIIGGKTDEDHDVNIKGINQYINIYNQHHKDEKLPKLKALFKQILSDRNAISWLPEEFNSDQEVLNAIDDCYKRLSENVLGDKVLKSLLCSLSDYNLNGIFVRNDLQLTDISQKMFGNWSVIQNAIMQNIKNVAPARKRKESEEDYEKRISDIFKKADSFSIQYINDCLNEMDDNNLHTVDGYFAKLGAVNTPTMQRENLFALIQNAYTDISDLLDTPYPENKNLAQDKTNVAKVKALLDAIKSLQHFVKPLLGKGDESDKDERFYGELASLWTELDTVTPLYNMIRNYMTRKPYSEKKIKLNFENPQLLGGWDANKEKDYATIILRRNGMYYLAIMDKDSKKLLGKTMPYDGECYEKMVYKLLPGANKMLPKVFFAKSRINDFKPSKKIVENYNNGTHKKGKNFNINDCHDLIDYFKQSIDKHEDWSKFGFNFSDTSTYEDLSGFYREVEQQGYKLSFTNISVSFIDKLVDEGKMYLFQIYNKDFSDYSKGTPNMHTLYWKALFDERNLADVVYKLNGQAEMFYRKKSIDYTHPTHPANHPIQNKNKDNKKKESVFEYDLVKDRRYTVDKFLFHVPITMNFKSVGSENINQQVREYLQQADDTHIIGIDRGERHLLYLVVIDMQGNIKEQFTLNEIVNEYNGNTYRTNYHDLLDTREEERLTARQSWQTIENIKELKEGYLSQVIHKITQLMVKYHAVVVLEDLNKGFMRGRQKVEKQVYQKFEKMLIDKLNYLVDKKVDATQSGGLLNAYQLTSKFDSFQKLGKQSGFLFYIPAWNTSKIDPVTGFVNLLDTRYQNTEKAKAFFSKFDAIRYNADKDWFEFNLDYDKFGTKAEDTRTTWTLCTQGNRICTFRNAEKNSQWDNQEVDLTRELKSLFEHYNINICGNLKEEICSQTDKAFFTGLLHILKLTLQMRNSITGTETDYLVSPVADENGVFYDSRSCGDTLPKNADANGAYNIARKGLMLIGQIKETKDLANFKYDISNKAWLNFAQQKPYKK

SEQ ID NO: 1640 - protein, 1236 aa, unidentified
  REGION 1..1236: note = Description of Unknown: uncultivated organism sequence
  REGION 1..1236: note = Category: MG75 effectors
  REGION 1..1236: note = Description: MG75-126 effector
MEEYYESYMSKSNDENVSKTFKEIQENLRSVIAKKLTDNNAYANLFGNKLIESYKDKDEKNKIIDSDLIQFINTAEPSQLDSMSQDEAKELVKEFWGFTTYFVGFFDNRKNMYTSEEKSTGIAYRLINENLPKFIDNMEAFKKAVAKPEIQANIEELYSNFAEYLNVESIQEMFQLDYYNMLLTQKQIDVYNAIIGGKTDEEHDVKIKGINEYINLYNQQHKDEKLPKLKALFKQILSDRNAISWLPEEFNSDQEVLNAIKDCYERLSENVLGDKVLKSLLCSLSDYNLNGIFVRNDLQLTDISQKMFGNWSVVQDAIMQNIKNVAPARKRKESEEDYEKRISDIFKKADSFSIQYINDCLNEMDDNNLHAVDGYFATLGAVNTPTMQRENLFALIQNAYTDISNLLETPYPENKNLAQDKTNVAKVKALLDAIKSLQHFVKPLLGKGDESDKDERFYGELASLWTELDTVTPLYNMVRNYMTRKPYSEKKIKLNFENPQLLGGWDANKEKDYATIILRRNGMYYLVIMDKDSKKLLGKTMPSDGECYEKMVYKQFDISKQLPKCTTELKRVRKALVEDAKRSCLLSDSKDWNKPLNVTRKLWELNNYVWDKKKADWVLRKKENETRPKKFHKKYLELTSDKKGYNQAKNDWIKFTKEFLSSYKKVEAYDIHYKKRYNSVDELYKQLNGDFYTISFSYVSVSFIEKLVDEGKMYLFQIYNKDFSDYSKGTPNMHTLYWKALFDERNLADVVYKLNGQAEMFYRKKSINNTPPTHPANHPIQNKNKDNKKKESVFEYNLIKDRRYTVDKFLFHVPITMNFKSVGSENINQQVREYLQQADDTHIIGIDRGERHLLYLVVIDMQGEIKEQFTLNEIVNEYNGNTYRTNYHDLLDTREEERLKARQSWQTIENIKELKEGYLSQVIHKITQLMVKYHAVVVLEDLNKGFIRGRQKVEKQVYQKFEKMLIDKLNYLVDKKADAVQSGGLLNAYQLTSKFDSFQKLGKQSGFLFYIPAWNTSKIDPVTGFVNLLDTRQNTEKAKAFFSKFDVIRYNANKDWFEFNLDYDKFGTKAEGTRTKWILCTQGNRICTFRNTEKNSQWDNQEVDLTREMKSLFNYYHINICGNLKEEICSQTDKAFFTGLLHMLKLTLQMRNSITGTETDYLVSPVADENGVFYDSRSCGDTLPKNADANGAYNIARKGLMLIRQIKETKDLANFKYDISNKAWLNFAQQKPYKNE

SEQ ID NO: 1641 - protein, 1274 aa, unidentified
  REGION 1..1274: note = Description of Unknown: uncultivated organism sequence
  REGION 1..1274: note = Category: MG75 effectors
  REGION 1..1274: note = Description: MG75-127 effector
MAKIFEDFKRLYPLSKTLRFEAKPIGATLDNIIKSGLLDEDEHRAASYVRVKKLIDEYHKVFIDRVLDNGCLPLKNEGHNNSLTEYYESYVTKSQNEDAKKVFKEIQQNLRSIIAKKLTEDKAYANLFGKNLIESYKDKTDKTKIIDSDLIKFINTAESTQLDSMSQDEAKELVKEFWGFTTYFVGFYDNRKNMYTAEEKSTGIAYRLVNENLPKFIDNMEAFKKAIARPEIQANMEELYSDFSEYLNVESVQEMFQLDYYNMLLTQKQIDVYNAIIGGKTDDEHDVKIKGINEYINLYNQQHKDDKLPKLKALFKQILSDRNAISWLPEEFNGDQEVLNAIKDCYERLSENVLGDKVLKSLLGSLSDYSLDGIFIRNDLQLTDISQKMFGNWCVIQNAIMQNIKHVAPARKHKESEEDYEKRIAGIFKKVDSFSISFINDCLNEADPNNAYFVENYFATFGAVNTPTMQRENLFALVQNAYTEVAALLHSDYPTAKHLAQDKVNVAKIKALLDAIKSLQHFVKPLLGKGDESDKDERFYGELASLWAELDTVTPLYNMIRNYMTRKPYSQKKIKLNFENPQLLGGWDANKEKDYATIILRRDGLYYLAIMNKESKKLLGKAMPSDGECYEKMVYKLLPGANKMLPKVFFAKSRMEDFKPSKELVEKYNNGTHKKGKNFNIQDCHNLIDYFKQSISKHEDWGKFGFNFSDTSTYEDLSGFYREVEQQGYKLSFVRVSVSYINQLVEEGKMYLFQIYNKDFSEYSKGTPNMHTLYWKALFDERNLADVVYKLNGQAEMFYRKKSIENTYPTHPANHPILNKNKDNKKKESLFDYDLIKDRRYTVGKFMFHVPITMNFKSSGSENINQDVKAYLRHADDMHIIGIDRGERHLLYLVVIDLQGNIKEQYSLNEIVNEYNGNTYHTNYHDLLDVREEERLKARQSWQTIENIKELKEGYLSQVIHKITQLMVKYHAIVVLEDLNMGFMRGRQKVEKQVYQKFEKMLIDKLNYLVDKKADASVSGGLLNAYQLTSKFDSFQKLGKQSGFLFYIPAWNTSKIDPVTGFVNLLDTRYQNVEKAKVFFSKFDAIRYNKDKDWFEFNLDYDKFGKKAEGTRTKWALCTRGMRIDTFRNKEKNSQWDNQEVDLTAEMKSLLEHYYIDIHGNLKDAISAQTDKAFFTGLLHILKLTLQMRNSITGTETDYLVSPVADENGIFYDSRSCGDELPENADANGAYNIARKGLMMIEQIKDAKDLDNLKFDISNKSWLNFAQQKPYKNE

SEQ ID NO: 1642 - protein, 1272 aa, unidentified
  REGION 1..1272: note = Description of Unknown: uncultivated organism sequence
  REGION 1..1272: note = Category: MG75 effectors
  REGION 1..1272: note = Description: MG75-128 effector
MKFDDFKKLYSLSKTLRFEAKPVGSTLKNIIESGLLEEDEHRAQSYVKVKKLIDEYHKVFIDRVLNDGCLTIENKGKKDSLEEYYESYMSKSNDENVSKTFKEIQENLRSVIAKKLTDDNAYANLFGNKLIESYKDKDEKNKIIDSDLIQFINTAEPSQLDSMSQDEANELVKEFWGFTTYFVGFFDNRKNMYTSEEKSTGIAYRLINENLPKFIDNMEAFKKAVAKPEIQANIEELYSNFAEYLNVESIQEMFQLDYYNMLLTQKQIDVYNAIIGGKTDEEHDVKIKGINEYINLYNQQHKDEKLPKLKALFKQILSDRNAISWLPEEFNSDQKVLNAIDDCYKRLSENVLGDKVLKSLLCSLDDYNLDGIFVRNDLQLTDISQKMFGNWSVIQNAIMQNIKNVAPARKRKESEEDYEKRISDIFKKADSFSIQYINDCLNEMDDNNLHAVDGYFATLGAVNTPAMQRENLFALIQNAYTDISNLLETPYPENKNLAQDKTNVAKVKALLDAIKSLQHFVKPLLGKGDESDKDERFYGELASLWTELDTVTPLYNMIRNYMTRKPYSEKKIKLNFENPQLLGGWDANKEKDYATIILRRNGMYYLAIMDKDSKKLLGKTMPSDGECYEKMVYKLLPGANKMLPKVFFAKSRINDFKPSKLIVENYNNGTHKKGKNFNINDCHNLIDYFKQSIDKHEDWSKFGFNFSDTSTYEDLSGFYREVEQQGYKLSFTNVSVSFIDKLVDEGKMYLFQIYNKDFSDFSKGTPNMHTLYWKALFDERNLADVVYKLNGQAEMFYRKKSINNTHPTHPANHPIQNKNKDNKKKESVFEYDLIKDRRYTVDKFLFHVPITMNFKSVGSENINQQVREYLQQADDTHIIGIDRGERHLLYLVVIDMQGNIKEQFTLNEIVNEYNGNTYHTNYHDLLDTREEERLTARQSWQTIENIKELKEGYLSQVIHKITQLMVKYHAVVVLEDLNKGFMRGRQKVEKQVYQKFEKMLIDKLNYLVDKKADAAQSGGLLNAYQLTSKFDSFQKLGKQSGFLFYIPAWNTSKIDPVTGFVNLLDTRYQNTEKAKAFFSRFDAIRYNANKDWFEFYLDYDKFCTKAEGTRTRWTLCTQGSRISTFRNAEKNSQWDNLEVDLTREMKSLFEHYHINICGNLKEEICLQTDKAFFTGLLHMLKLTLQMRNSITGTETDYLISPVADENGTFYDSRSCGDTLPKNADANGAYNIARKGLMFIGQIKETKDLANFKYDISNKAWLNFAQQKPYKNE

SEQ ID NO: 1643 - protein, 1245 aa, unidentified
  REGION 1..1245: note = Description of Unknown: uncultivated organism sequence
  REGION 1..1245: note = Category: MG75 effectors
  REGION 1..1245: note = Description: MG75-129 effector
METFSDFTNLYPLSKTLRFRLIPVGETLRHFIDSGILEEDQHRAESYVKVKAIIDDYHRAYIESSLSGFELPVESMGKSNSLEEYYQYHNIRNKTEDIQNTLSKVRDNLRKQIVNQLIKSEMFKRIDKKELIQTDLIDFVKNDPDENEKITLISEFRNFTVYFKGFHENRKNMYSDEEKSTSIAFRLIHENLPKFIDNMEVFAKIQNTSISEEFDAIQKELCPDSVAFADMFKLGYFNRTLSQKQIDAYNTVISGRMTAEGGKIKGLNEYINLYNQQHKQEKLPKMKLLFKQILSDRESASWLPEKLENDKQVVGALVDFWNTIHDTVLAEGGLKTVISSLVSYSLEGIFLKNDLQLTDVSQKATGSWSKIPAAIKQNLEAMNPQKKKESYEGYQERIDKIFKSYKSFSLAFINECLHGEYKIEDYFIELGAINTDSLQKENHFSHIFNTYTDIKEVIEFYSESIDTKLIRDNDSIQKIKQFLDAVKDLQAYVKPLLGNGDETGKDERFYGDFVEYWNQLDLITPLYNMVRNYVTQKPYSIEKIKINFQNPTLLNGWDLNKETDNTSVILRRDGKYYLAIMNNKCRKVFLKYPSGSDRSCYEKMEYKLLPGANKMLPKVFLSKSRINEFMPDERLLSNYEKGTHKKTGNSFSLTDCHALIDFFKKSLNKHEDWKNFGFKFSDTSTYTDMSGFYKEVENQGYKLSFKPIDAVYVDQLVDEGKIFLFQIYNKDFSEHSKGTPNLHTLYWKMLFDETNLGDVVYKLNGEAEVFFRKASIKVSSPTHPANVPIKKKNPKHKDEERILKYDLIKDKRYTVDQFQFHVPITMNFKSDGNGNINQRVIEYLRSVSDIHIIGIDRGERNLLYLVVIDGSGKICEQFSLNEIKVEYNGETYSTNYHDLLDIKEDERKQARQSWQSIANIKDLKEGYLSQVIHKISELMVKYNAIVVLEDLNTGFMRGRQKVEKQVYQKFEKMLIEKLNYLVFKKQPSNLCGGLMHAYQLTNKFEGFNKLGKQSGFLFYIPAWNTSKMDPVTGFVNLFDLKYESIDKAKSFFSKFDSIRYNVERDMFEWKFNYDEFTKKAEGTKTNWTVCSYGNRIITFRNPNKNSQWDNKEINLTENIKLLFERFGIDLSSNLKDEIMQRTEKEFFIELISLFKLVLQMRSSWTGTDIDYLISPVCNENGEFFDSRNVDETLPQNADANGAYNIARKGMILLDKIKKSNGEKKLVLSITNREWLSFAQGCCKNG

SEQ ID NO: 1644 - protein, 1058 aa, unidentified
  REGION 1..1058: note = Description of Unknown: uncultivated organism sequence
  REGION 1..1058: note = Category: MG75 effectors
  REGION 1..1058: note = Description: MG75-130 effector
MAKNFEDFKRLYSLSKTLRFEAKPIGATLDNIVKSGLLDEDEHRAASYVKVKKLIDEYHKVFIDRVLDDGCLPLENKGNNNSLAEYYESYVSRAQDEDAKKKFKEIQQNLRSVIAKKLTEDKAYANLFGNKLIESYKDKEDKKKIIDSDLIQFINTAESTQLDSMSQDEAKELVKEFWGFVTYFYGFFDNRKNMYTAEEKSTGIAYRLVNENLPKFIDNIEAFNRAITRPEIQENMGVLYSDFSEYLNVESIQEMFQLDYYNMLLTQKQIDVYNAIIGGKTDDEHDVKIKGINEYINLYNQKHKDDKLPKLKALFKQILSDRNAISWLPEEFNSDQEVLNAIKDCYERLSENVLGDKVLKSMLGSLADYSLDGIFIRNDLQLTDISQKMFGNWSVIQNAIMQNIKHVAPARKHKESEEEYENRIAGIFKKADSFSISYIDACLNETDPNNAYFVENYFATLGAVDTPTMQRENLFALVQNAYTEITALLHSDYPTEKNLAQDKANVAKIKALLDAIKSLQHFVKPLLGKGDESDKDERFYGELASLWAELDTMTPLYNMIRNYMTRKPYSQKKIKLNFENPQLLGGWDANKEKDYATIILRRNGLYYLAIMNKDSKKLLGKAMPSDGECYEKMVYKLLPGANKMLPKVFFAKSRMEDFKPSKELVEKYNNGTHKKGKNFNIQDCHNLIDYFKQSIDKHEDWSKFGFKFSDTSTYEDLSGFYREVEQQGYKLSFARVSVSYINQLVEEGKMYLFQIYNKDFSEYSKGTPNMHTLYWKALFDERNLADVVYKLNGQAEMFYRKKSIENTHPTHPANHPILNKNKDNNKKESLFEYDLIKDRRYTVDKFMFHVPITMNFKSSGSENINQDVKAYLCHADDMHIIGIDRGERHLLYLVVIDLQGNIKEQFSLNEIVNDYNGNTYHTNYHDLLDVREDERLKARQSWQTIENIKELKDGYLSQVIHKITQLMVKYHAIVVLEDLNMGFMRGRQKVEKQVYQKFEKMLIEKLNYLVDKKADASVSGGLLNAYQLTSKFDSFQKLGKQSGFLFYRECKLNCVKLQ

SEQ ID NO: 1645 - protein, 897 aa, unidentified
  REGION 1..897: note = Description of Unknown: uncultivated organism sequence
  REGION 1..897: note = Category: MG75 effectors
  REGION 1..897: note = Description: MG75-131 effector
MAKIFEDFKRLYPLSKTLRFEAKPIGATLDNIIKSGLLDEDEHRAASYVRVKKLIDEYHKVFIDRVLDNGCLPLKNEGHNNSLTEYYESYVTKSQNEDAKKVFKEIQQNLRSIIAKKLTEDKAYANLFGKNLIESYKDKTDKTKIIDSDLIKFINTAESTQLDSMSQDEAKELVKEFWGFTTYFVGFYDNRKNMYTAEEKSTGIAYRLVNENLPKFIDNMEAFKKAIARPEIQANMEELYSDFSEYLNVESVQEMFQLDYYNMLLTQKQIDVYNAIIGGKTDDEHDVKIKGINEYINLYNQQHKDDKLPKLKALFKQILSDRNAISWLPEEFNGDQEVLNAIKDCYERLSENVLGDKVLKSLLGSLSDYSLDGIFIRNDLQLTDISQKMFGNWCVIQNAIMQNIKHVAPARKHKESEEDYEKRIAGIFKKVDSFSISFINDCLNEADPNNAYFVENYFATFGAVNTPTMQRENLFALVQNAYTEVAALLHSDYLTAKHLAQDKVNVAKIKALLDAIKSLQHFVKPLLGKGDESDKDERFYGELASLWAELDTVTPLYNMIRNYMTRKPYSQKKIKLNFENPQLLGGWDANKEKDYATIILRRDGLYYLAIMNKDSKKLLGKAMPSDGECYEKMVYKLLPGANKMLPKVFFAKSRMEDFKPSKELVEKYNNGTHKKGKNFNIQDCHNLIDYFKQSISKHEDWGKFGFNFSDTSTYEDLSGFYREVEQQGYKLSFTRVSVSYISQLVEEGKMYLFQIYNKDFSEYSKGTPNMHTLYWKALFDERNLADVVYKLNGQAEMFYRKKSIENTHPTHPATHPILNKNKDNKKKESLFDYDLIKDRRYTVDKFMFHVPITMNFKSSGSENINQDVKAYLRHADDMHIIGIDRGERHLLYLVVID

SEQ ID NO: 1646 - protein, 910 aa, unidentified
  REGION 1..910: note = Description of Unknown: uncultivated organism sequence
  REGION 1..910: note = Category: MG75 effectors
  REGION 1..910: note = Description: MG75-132 effector
MYFDDFKKLYPLSKTLRFEAKPVGPTFKHIKERGLLEEDEHRAISYVKVKKLIDEYHKAFVGKALNNGCLLYESCGNKNSLIEYYETYKSKEGEARKTMKEIQKNLREMIVGAFEKEEDYANLFKGGLIEPYKSGGKHKEPDILRLINTAGFSQLAGMSQEEAKSLIKEFWRFTTYFVGFFDNRGNMYTSEEKSTGIAYRLINENLPRFIDNMEIFNKIIGKSEIQARVTELYSDFEGYLNVGSIQEMFKLDYYNALLTQKQIDVYNAIISGRTTTGPESKKIKGLNEYINLYNQQHKDGKLPKFKPLFKQILSDREALSWLPDEFVNDQEMLNAIKNCYEKLTGNILGESALKVLLGSLADYDLGGIFVRNDSQLTNISQRMFGRWDAIQNAILQDIRKTAPMRKRRESEEDYENRIDKMFKKADSFSIKYINDCIREIAVDDTLFVEDYFATLGAVNTPTIQRENLFLLVQNAFTDVADLLNSEYSAEKSLAQDSVNVSKIKALLDAIKSLQQFVRPLLGNGDENEKDERFYGEFTSLWAELDEVTLLYDMVRNRMTRKPYSQKKIKLNFANPKLLNGWDENKEKDNSCIILRRDGKYYLAVMDKKSKNLLGKPMPSDGECYEKMVYKLLPGAQKMFPKVFFAKSRIDEFKPSEHILNIYSNGTHKKGNKNFNIEDCHDLIDFFKESIRRHKDWNKFGFEFSDTSTYENVNEFYREADEQGYKLSFVNVSVAYIDKLVNEGEMYLFQIYNKDFSEYSKGTPNMHTLYWKALFDDRNLVDMVYKLNGQAELFYRKKSLDSIRPTHPANQPIKNKNKNNKKKESLFEYDLVKDRRYTVDKFMFHVPITMNFKNAGLEKINQQVREYLQQADDTHIIGIDRGERHLLYLVVIDMHGNIKEQFSLNEIVNEC

SEQ ID NO: 1647 - protein, 1269 aa, unidentified
  REGION 1..1269: note = Description of Unknown: uncultivated organism sequence
  REGION 1..1269: note = Category: MG75 effectors
  REGION 1..1269: note = Description: MG75-133 effector
MYFDDFKKLYPLSKTLRFEAKPVGPTFKHIKERGLLEEDEHRAISYVKVKKLIDEYHKAFVGKALNNGCLLYESCGNKNSLIEYYETYKSKEGEARKTMKEIQKNLREMIVGAFEKEEDYANLFKGGLIEPYKSGGKHKEPDILRLINTAGFSQLAGMSQEEAKSLIKEFWRFTTYFVGFFDNRGNMYTSEEKSTGIAYRLINENLPRFIDNMEIFNKIIGKSEIQARVTELYSDFEGYLNVGSIQEMFKLDYYNALLTQKQIDVYNAIISGRTTTGPESKKIKGLNEYINLYNQQHKDGKLPKFKPLFKQILSDREALSWLPDEFVNDQEMLNAIKNCYEKLTGNILGESALKVLLGSLADYDLGGIFVRNDSQLTNISQRMFGRWDAIQNAILQDIRKTAPMRKRRESEEDYENRIDKMFKKADSFSIKYINDCIREIAVDDTLFVEDYFATLGAVNTPTIQRENLFLLVQNAFTDVADLLNSEYSAEKSLAQDSVNVSKIKALLDAIKSLQQFVRPLLGNGDENEKDERFYGEFTSLWAELDEVTLLYDMVRNRMTRKPYSQKKIKLNFANPKLLNGWDENKEKDNSCIILRRDGKYYLAVMDKKSKNLLGKPMPSDGECYEKMVYKLLPGAQKMFPKVFFAKSRIDEFKPSEHILNIYSNGTHKKGNKNFNIEDCHDLIDFFKESIRRHKDWNKFGFEFSDTSTYENVNEFYREADEQGYKLSFVNVSVAYIDKLVNEGEMYLFQIYNKDFSEYSKGTPNMHTLYWKALFDDRNLVDMVYKLNGQAELFYRKKSLDSIRPTHPANQPIKNKNKNNKKKESLFEYDLVKDRRYTVDKFMFHVPITMNFKNAGLEKINQQVREYLQQADDTHIIGIDRGERHLLYLVVIDMHGNIKEQFSLNEIVNECSGNTYHTNYHALLDAREEERLNARRSWQTIESIKELKEGYLSQVIHRITQLMVKYHAIVVLEDLSMGFMRGRQKVEKQVYQKFEKMLIDKLNYLVDKKVDVSQPGGLLNAYQLTNKFESFQSSEKQSGFVFYIPAWNTSKIDPVTGFVNLLDTRYQNVEKARAFFSKFDAIRYNKDKDWFEFGVDYDNFNKKAEGTMTKWTLCTQGVRICTFRNAEKNSQWDTQEVDLTTEMKSLFGQSQIDVNGNLKEAICSQSDKTFFMRLLHLLKLMLQMRNSITGTEIDYLVSPVADGNGNFYDSRKCDSTLPKNADANGAYNIARKGLMLLRQMKTADNLTDVKFDMTNRTWLKFAQQKPYKDE

SEQ ID NO: 1648 - protein, 848 aa, unidentified
  REGION 1..848: note = Description of Unknown: uncultivated organism sequence
  REGION 1..848: note = Category: MG75 effectors
  REGION 1..848: note = Description: MG75-134 effector
MAKIFEDFKRLYPLSKTLRFDAKPVGATLDNIVKSGLLEEDEHRAASYVRVKKLIDEYHKVFIDRVLDNGCLPLENKGENNSLAEYYDSYVSKSQNEDAKKAFEENQQNLRSIIAKKLTGDKAYANLFGKNLIESYKDKKDKKKIIDSDLIQFINTADSTQLDSMTQVEAKELVKEFWGFVTYFYGFFDNRKNMYTAEKKSTGIAYRLINENLPKFIDNMEAFKKVIARPEIQANMEELYSDFSEYLNVESIQEMFQLDYYDMLLTQKQIDVYNAIIGGKTDDEHDVKIKGINEYINLYNQQHKDTRLPKLKALFKQILSDRNAISWLPEEFNSDQEVLNAIKDCYERLSENVLGDKVLKSLLGSLADYSLEGIFIRNDLQLTDVSQKMFGNWGVIQNAIMQNIKHVAPARKHKESEENYEKRIAGIFKKADSFSISYINDCLNEADPNNAYFVENYFATFGAVNTPTMQRENLFALVQNAYTEVAALLHSDYPTVKHLAQDKANVSKIKALLDAIKSLQHFVKPLLGNGDESGKDDRFYGELASLWAELDTVTPLYNMIRNYMTRKPYSQKKIKLNFENPQLLGGWDANKEKDYATIILRRNGLYYLAIMGKDSKNLLGKAMPSDGECYEKMVYKQFDISKQLPKCTTELKHVKKALVENAKRSCLLSDINNWNKPLNVTRKLWELNNFVWDKKKEDWVLRKKDNETRPKKFHKKYLELTSDKKGYNQAINDWIKFTKEFLSSYKKVEAYEIHYKKRYNSVDELYKQLNGDLYAISFTYVSVSFIEQLVSEGKMYLFQIYNKDFSKYSKGTPNMHTLYWKALFDERNLADVVYKLNGQAEMFYRKGV

SEQ ID NO: 1649 - protein, 1304 aa, unidentified
  REGION 1..1304: note = Description of Unknown: uncultivated organism sequence
  REGION 1..1304: note = Category: MG75 effectors
  REGION 1..1304: note = Description: MG75-135 effector
MFPACFQEQRTGHPNNIVKSGLLEEDEHRAASYVRVKKLIDEYHKVFIDRVLDNGCLPLENKGENNSLAEYYDSYVSKSQNEDAKKAFEENQQNLRSIIAKKLTGDKAYANLFGKNLIESYKDKKDKKKIIDSDLILFINTADSTQLDSMTQVEAKELVKEFWGFVTYFYGFFDNRKNMYTAEKKSTGIAYRLINENLPKFIDNMEAFKKVIARPEIQANMEELYSDFSEYLNVESIQEMFQLDYYDMLLTQKQIDVYNAIIGGKTDDEHDVKIKGINEYINLYNQQHKDTRLPKLKALFKQILSDRNAISWLPEEFNSDQEVLNAIKDCYERLSENVLGDKVLKSLLGSLADYSLEGIFIRNDLQLTDVSQKMFGNWGVIQNAIMQNIKHVAPARKHKESEEEYEKRIAGIFKKADSFSISYLNDCLNEADPNNAYFVENYFATFGAVNTPTMQRENLFALVQNKYTEVAALLHSDYPTAKHLAQDKANVAKIKALLDAIKSLQHFVKPLLGKGDESDKDERFYGELASLWAELETVTPLYNMIRNYMTRKPYSQKKIKLNFENPQLLDGWDANKEKDYATIILRRNGLYYLAIMGKDSKNLLGKAMPSDGECYEKMVYKQFDISKQLPKCTTELKHVRKALVEDAKRSCLLSDFNNWNKPLNVTRKLWELNNFVWDKKKEDWVLRKKDNETRPKKFHKKYLELTSDKKGYNQAKNDWIKFIKEFLSSYKKVEAYDIHYKKRYNSVDELYKQLNGDLYAISFTYVSASFIEQLVSEGKMYLFQIYNKDFSEYSKGTPNMHTLYWKALFDERNLADVVYKLNGQAEMFYRKKSLENTHPTHPANHPILNKNKDNKKKESLFDYDLIKDRRYTVDKFMFHVPITMNFKSSGSENINQDVKAYLRHADDMHIIGIDRGERHLLYLVVIDLQGNIKEQYSLNEIVNEYNGNTYHTNYHDLLDVREEERLKARQSWQTIENIKELKEGYLSQVIHKITQLMVKYHAIVVLEDLNMGFMRGRQKVEKQVYQKFEKMLIDKLNYLVDKKADASVSGGLLNAYQLTSKFDSFQKMGKQSGFLFYIPAWNTSKIDPVTGFVNLLDTRYQNVEKAKVFFSKFDAIRYNKDKDWFEFNLDYDKFGKKAEGTRTKWALCTRGMRIDTFRNKEKNSQWDNQEVDLTAEMKSLLEHYYIDIHGNLKDAISAQTDKTFFTGLLHILKLTLQMRNSITGTETDYLVSPVADENGIFYDSRSCGDELPENADANGAYNIARKGLMMIEQIKDAKDLNNLKFDISNKAWLNFAQQKPYKNG

SEQ ID NO: 1650 - protein, 870 aa, unidentified
  REGION 1..870: note = Description of Unknown: uncultivated organism sequence
  REGION 1..870: note = Category: MG75 effectors
  REGION 1..870: note = Description: MG75-136 effector
MAKIFEDFKRLYPLSKTLRFEAKPIGATLDNIIKSGLLDEDEHRAASYVRVKKLIDEYHKVFIDRVLDNGCLPLKNEGHNNSLTEYYESYVTKSQNEDAKKVFKEIQQNLRSIIAKKLTEDKAYANLFGKNLIESYKDKTDKTKIIDSDLIKFINTAESTQLDSMSQDEAKELVKEFWGFTTYFVGFYDNRKNMYTAEEKSTGIAYRLVNENLPKFIDNMEAFKKAIARPEIQANMEELYSDFSEYLNVESVQEMFQLDYYNMLLTQKQIDVYNAIIGGKTDDEHDVKIKGINEYINLYNQQHKDDKLPKLKALFKQILSDRNAISWLPEEFNGDQEVLNAIKDCYERLSENVLGDKVLKSLLGSLSDYSLDGIFIRNDLQLTDISQKMFGNWCVIQNAIMQNIKHVAPARKHKESEEDYEKRIAGIFKKVDSFSISFINDCLNEADPNNAYFVENYFATFGAVNTPTMQRENLFALVQNAYTEVAALLHSDYPTAKHLAQDKVNVAKIKALLDAIKSLQHFVKPLLGKGDESDKDERFYGELASLWAELDTVTPLYNMIRNYMTRKPYSQKKIKLNFENPQLLGGWDANKEKDYATIILRRDGLYYLAIMNKESKKLLGKAMPSDGECYEKMVYKLLPGANKMLPKVFFAKSRMEDFKPSKELVEKYNNGTHKKGKNFNIQDCHNLIDYFKQSISKHEDWGKFGFNFSDTSTYEDLSGFYREVEQQGYKLSFTRVSVSYISQLVEEGKMYLFQIYNKDFSEYSKGTPNMHTLYWKALFDERNLADVVYKLNGQAEMFYRKKSIENTHPTHPANHPILNKNKDNKKKESLFDYDLIKDRRYTVDKFMFHVPVTMNFKSSGSENINQDVKA

SEQ ID NO: 1651 - protein, 1304 aa, unidentified
  REGION 1..1304: note = Description of Unknown: uncultivated organism sequence
  REGION 1..1304: note = Category: MG75 effectors
  REGION 1..1304: note = Description: MG75-137 effector
MFPASFQEQRTGHPNNIVKSGLLEEDEHRAASYVRVKKLIDEYHKVFIDRVLDNGCLPLENKGENNSLAEYYDSYVSKSQNEDAKKAFEENQQNLRSIIAKKLTGDKAYANLFGKNLIESYKDKKDKKKIIDSDLIQFINTADSTQLDSMTQVEAKELVKEFWGFVTYFYGFFDNRKNMYTAEKKSTGIAYRLINENLPKFIDNMEAFKKVIARPEIQANMEELYSDFSEYLNVESIQEMFQLDYYDMLLTQKQIDVYNAIIGGKTDDEHDVKIKGINEYINLYNQQHKDTRLPKLKALFKQILSDRNAISWLPEEFNSDQEVLNAIKDCYERLSENVLGDKVLKSLLGSLADYSLEGIFIRNDLQLTDVSQKMFGNWGVIQNAIMQNIKHVAPARKHKESEEEYEKRIAGIFKKADSFSISYLNDCLNEADPNNAYFVENYFATFGAVNTPTMQRENLFALVQNKYTEVAALLHSDYPTAKHLAQDKANVAKIKALLDAIKSLQHFVKPLLGKGDESDKDERFYGELASLWAELETVTPLYNMIRNYMTRKPYSQKKIKLNFENPQLLDGWDANKEKDYATIILRRNGLYYLAIMGKDSKNLLGKAMPSDGECYEKMVYKQFDISKQLPKCTTELKHVRKALVEDAKRSCLLSDFNNWNKPLNVTRKLWELNNFVWDKKKEDWVLRKKDNETRPKKFHKKYLELTSDKKGYNQAKNDWIKFIKEFLSSYKKVEAYDIHYKKRYNSVDELYKQLNGDLYAISFTYVSASFIEQLVSEGKMYLFQIYNKDFSEYSKGTPNMHTLYWKALFDERNLADVVYKLNGQAEMFYRKKSIENTHPTHPANHPILNKNKDNKKKESLFDYDLIKDRRYTVDKFMFHVPITMNFKSSGSENINQDVKAYLRHADDMHIIGIDRGERHLLYLVVIDLQGNIKEQYSLNEIVNEYNGNTYHTNYHDLLDVREEERLKARQSWQTIENIKELKEGYLSQVIHKITQLMVKYHAIVVLEDLNMGFMRGRQKVEKQVYQKFEKMLIDKLNYLVDKKADASVSGGLLNAYQLTSKFDSFQKMGKQSGFLFYIPAWNTSKIDPVTGFVNLLDTRYQNVEKAKVFFSKFDAIRYNKDKDWFEFNLDYDKFGKKAEGTRTKWALCTRGMRIDTFRNKEKNSQWDNQEVDLTAEMKSLLEHYYIDIHGNLKDAISAQTDKTFFTGLLHILKLTLQMRNSITGTETDYLVSPVADENGIFYDSRSCGDELPENADANGAYNIARKGLMMIEQIKDAKDLNNLKFDISNKAWLNFAQQKPYKNG

SEQ ID NO: 1652 - protein, 886 aa, unidentified
  REGION 1..886: note = Description of Unknown: uncultivated organism sequence
  REGION 1..886: note = Category: MG75 effectors
  REGION 1..886: note = Description: MG75-138 effector
METFSGFTNLYPLSKTLRFRLIPVGETLKYFIGSGILEEDQHRAESYVKVKAIIDDYHRAYIENSLSGFELPLESTGKFNSLEEYYLYHNIRNKTEEIQNLSSKVRTNLRKQVVAQLTKNEIFKRIDKKELIQSDLIDFVKNEPDANEKIALISEFRNFTVYFKGFHENRRNMYSDEEKSTSIAFRLIHENLPKFIDNMEVFAKIQNTSISENFDAIQKELCPELVTLCEMFKLGYFNKTLSQKQIDAYNTVIGGKTTSEGKKIKGLNEYINLYNQQHKQEKLPKMKLLFKQILSDRESASWLPEKFENDSQVVGAIVNFWNTIHDTVLAEGGLKTIIASLGSYGLEGIFLKNDLQLTDISQKATGSWGKISSEIKQKIEVMNPQKKKESYETYQERIDKIFKSYKSFSLAFINECLRGEYKIEDYFLKLGAVNSSSLQKENHFSHILNTYTDVKEVIGLYSESTDTKLIQDNDSIQKIKQFLDAVKDLQAYVKPLLGNGDETGKDERFYGDLIEYWSLLDLITPLYNMVRNYVTQKPYSVDKIKINFQNPTLLNGWDLNKETDNTSVILRRDGKYYLAIMNNKSRKVFLKYPSGTDRNCYEKMEYKLLPGANKMLPKVFFSKSRINEFMPNERLLSNYEKGTHKKSGTCFSLDDCHTLIDFFKKSLDKHEDWKNFGFKFSDTSTYEDMSGFYKEVENQGYKLSFKPIDATYVDQLVDEGKIFLFQIYNKDFSEHSKGTPNMHTLYWKMLFDETNLGDVVYKLNGEAEVFFRKASINVSHPTHPANIPIKKKNLKHKDEERILKYDLIKDKRYTVDQFQFHVPITMNFKADGNGNINQKAIDYLRSASDTHIIGIDRGERNLLYLVVIDGNGKICEQFSLNEIPMR

SEQ ID NO: 1653 - protein, 886 aa, unidentified
  REGION 1..886: note = Description of Unknown: uncultivated organism sequence
  REGION 1..886: note = Category: MG75 effectors
  REGION 1..886: note = Description: MG75-139 effector
METFSGFTNLYPLSKTLRFRLIPVGETLKHFIGSGILEEDQHRAESYVKVKAIIDDYHRTYIENSLSGFELPLESTGKFNSLEEYYLYHNIRNKTEEIQNLSSKVRTNLRKQVVTQLTKNEIFKRIDKKELIQSDLIDFVKNEPDANEKIALISEFRNFTVYFKGFHENRRNMYSDEEKSTSIAFRLIHENLPKFIDNMEVFAKIQNTSISENFDAIQKELCPELVTLCEMFKLGYFNKTLSQKQIDAYNTVIGGKTTSEGKKIKGLNEYINLYNQQHKQEKLPKMKLLFKQILSDRESASWLLEKFENDSQVVGAMVNFWNTIHDTVLAEGGLKTIIASLGSYGLEGIFLKNDLQLTDISQKATGSWSKISSEIKQKIEAMNPQKKKESYESYQERIDKLFKSYKSFSLAFVNECLRGEYKIEDYFLKLGAVNSSLLQKENHFSHILNTYTDVKEVIGFYSESTDTKLIQDNDSIQKIKQFLDAVKDLQAYVKPLLGNSDETGKDERFYGDLIEYWSLLDLITPLYNMVRNYVTQKPYSVDKIKINFQNPTLLNGWDLNKEMDNTSVILRRDGKYYLAIMNNKSRKVFLKYPSGTDRNCYEKMEYKLLPGANKMLPKVFFSKSRINEFMPNERLLSNYEKGTHKKSGTCFSLDDCHTLIDFFKKSLNKHEDWKNFGFKFSDTSTYEDMSGFYKEVENQGYKLSFKPIDATYVDQLVDEGKIFLFQIYNKDFSEHSKGTPNMHTLYWKMLFDETNLGDVVYKLNGEAEVFFRKASINVSHPTHPANIPIKKKNLKHKDEERILKYDLIKDKRYTVDQFQFHVPITMNFKANGNGNINQKAIDYLRSASDTHIIGIDRGERNLLYLVVIDGNGKICEQFSLNEIPMR

SEQ ID NO: 1654 - protein, 1012 aa, unidentified
  REGION 1..1012: note = Description of Unknown: uncultivated organism sequence
  REGION 1..1012: note = Category: MG75 effectors
  REGION 1..1012: note = Description: MG75-140 effector
METFSGFTNLYPLSKTLRFRLIPVGETLKYFIGSGILEEDQHRAESYVKVKAIIDDYHRAYIENSLSGFELPLESTGKFNSLEEYYLYHNIRNKTEEIQNLSSKVRTNLRKQVVAQLTKNEIFKRIDKKELIQSDLIDFVKNEPDANEKIALISEFRNFTVYFKGFHENRRNMYSDEEKSTSIAFRLIHENLPKFIDNMEVFAKIQNTSISENFDAIQKELCPELVTLCEMFKLGYFNKTLSQKQIDAYNTVIGGKTTSEGKKIKGLNEYINLYNQQHKQEKLPKMKLLFKQILSDRESASWLPEKFENDSQVVGAIVNFWNTIHDTVLAEGGLKTIIASLGSYGLEGIFLKNDLQLTDISQKATGSWGKISSEIKQKIEVMNPQKKKESYETYQERIDKIFKSYKSFSLAFINECLRGEYKIEDYFLKLGAVNSSSLQKENHFSHILNTYTDVKEVIGLYSESTDTKLIQDNDSIQKIKQFLDAVKDLQAYVKPLLGNGDETGKDERFYGDLIEYWSLLDLITPLYNMVRNYVTQKPYSVDKIKINFQNPTLLNGWDLNKETDNTSVILRRDGKYYLAIMNNKSRKVFLKYPSGTDRNCYEKMEYKLLPGANKMLPKVFFSKSRINEFMPNERLLSNYEKGTHKKSGTCFSLDDCHTLIDFFKKSLDKHEDWKNFGFKFSDTSTYEDMSGFYKEVENQGYKLSFKPIDATYVDQLVDEGKIFLFQIYNKDFSEHSKGTPNMHTLYWKMLFDETNLGDVVYKLNGEAEVFFRKASINVSHPTHPANIPIKKKNLKHKDEERILKYDLIKDKRYTVDQFQFHVPITMNFKADGNGNINQKAIDYLRSASDTHIIGIDRGERNLLYLVVIDGNGKICEQFSLNEIEVEYNGEKYSTNYHDLLNVKENERKQARQSWQSIANIKDLKEGYLSQVIHKISELMVKYNAIVVLEDLNAGFMRGRQKVEKQVYQKFEKKLIEKLNYLVFKKQSSDLPGGLMHAYQLANKFESLVDDKI

SEQ ID NO: 1655 - protein, 982 aa, unidentified
  REGION 1..982: note = Description of Unknown: uncultivated organism sequence
  REGION 1..982: note = Category: MG75 effectors
  REGION 1..982: note = Description: MG75-141 effector
MIKEFEDFKRLYPIQKTLRFEAKPIGSTLEHLVKSGILDEDEHRAASYVRVKKLIDEYHKAFIDRVLNDGCLPFKNKGEKNSIEEYYESYTSKDKEEDSKKRFKEIQQNLRSIIVNKLTKDKAYANLFGNYLIESHKDKEDKKTMIDSDLIQFIKDADSLELGSMSKDEAIELVKEFWSFTTYFVGFYDNRKNMYSAEEKSTAIAYRLINENLPKFIDNMEAFKKIISRPEIQANTEQLYSDFAEYLNVESIQEMFQLDYYDILLTQKQIDVYNAIIGGKTDEKHDIKTKGINEYINLYNQQHKEDKLPKLKVLFKQILSDRNAISWLPEEFNSDQEMLISIKDCYEKLCVNVLGDKVLKSLLSSLDDYELEGIFLQNDQQLTNISQKIFGSWSVIQEAIIRNIKNTAPARKHKETEEDYEKRIFSIFKQAGSFSIKYIDDCLYDLDKNNINTIENYFATLGAENTPEIQRENLFALIKNAYTDVAGLLCSEYPTEKNLSQDENHVAKIKALLDAIKSLQHFVKPLLGNGDEHDKDERFYGELVSLWTELDTVTPLYNMVRNRITQKPYSQKKIKLNFENPQLLGGWDANKEKDYSCIILRREGMYYLAIMDKDSRKLLGKEMPSDGECYEKMVYKLLPGANKMLPKVFFAKSRIEEFMPSEQIIEKYNNGTHKKGKDFNITDCHNLIDYFKQSINKHEDWSKFGFTFSETSTYEDLSGFYREVEQQGYKLSFTNVSASYINSLVDEGKMYLFQIYNKDFSEYSKGTPNMHTLYWKALFDEQNLADVVYKLNGQAEIFYRKKSIDATHPTHPANRPVQNKNKDNKKKESLFEYDLIKDRRYSVDKFMFHVPITMNFKSNGSENINQQVKEYLQLANDTHIIGIDRGERHLLYLVVIDMHGNIKEQFSLNEIVNTYKGNIYHTNYHDLLEAREEERLKARQSWQTIENIKELKEGYLSQVVHKITQLMVKYHAIVVLEDLRVT

SEQ ID NO: 1656 - protein, 1228 aa, unidentified
  REGION 1..1228: note = Description of Unknown: uncultivated organism sequence
  REGION 1..1228: note = Category: MG75 effectors
  REGION 1..1228: note = Description: MG75-142 effector
MSNLYSKCHKLYSLSKTLRFELKPIGKTNENFENYILTSDKEKSEKFKKVKLYCDEYHKKFINDCLENFQNEKFVEVLNKYYELYVKNNRSDKENNEFEKIQELLRKIIAETFTKNKKYNGLFGKELFKNYLPEYYKNDEEKLSEIKLFSEFTTYFAGYNKNRENMYSAEEKTTAISYRLINQNLPTYIKNIQNYNKIKEYIPTINETISHKLQVDIEKYFNLEYFENILTQDAIDKYNYIIGGKALGDGTKIQGINEFINLYNQTNPDKKLPKLKVLYKQILSDKTNVSFKIDKIENDNELISLINNYYNILSPLLYSNDNNDTEFIKTIKDINQFDTNKIWVMTDNLTYLSQQVYKDWNYINHLIEEKYNQENLKNNKKINEKFLEKRDKELKKIKEYSLHDIEQLIIQNDKNLKIKNQGKLYKYITEKTIEIINNIKLSHSECEYILNTNYEPNSKQLLNDADKITKIKTLLDNVKLLQTTIKFLIPKSVGIQVDDTFYNAINYDILSEIIPIYNKTRNYVTQKPYSIEKFPLTFNCPTLLDGWDLNKEESNLSILLEKDGYYYLGIMNKKDNKIFRKLSEPQSNEQIYKKYEYKLLPGPNKMLPKVFFSNSRIDEFNPSEELLRKYQEGCHKKGNNFDIIFCRELIDFYKKSLFIHNDWKQFNFKFNNTNSYEDISQFYKQVEEQGYKISTQNISVQYIDELVENGKLFLFKIYNKDFSTYSKGTPNLHTMYWKALFDEDNLKDVVYKLNGGAEIFYRKKSIEYKITHPKNQAIKNKNELNHKKESLFQYDLIKDKRFTMDKFLFHVPITLNFKNQRLEYINELINSEIQRKTDINIIGVDRGERNLIYITVIDSNGKLLEQLSLNEIINEYKNETYKTDYHSLLDKKEKERNEARKSWGTIKNIKELKEGYMSQVIHKITDLMLKYNAIIVLEDLNSGFKNSRKKVEKQVYDKFETMLTNKLSYLINKKLDKNNDGGILNAYQLVNKETKGRQSGVLFYIPAWNTSKIDPVTGFVNLFYIKNMSIDKSKEFFNKFEDIRYNTKEDFFEFDIDYSKFTDKVYGIRKNWTICTYGERIRTFKNKDKNNEWDNEEINLTEKFKNLFNQYSINLSNIQEDIQKQTDRNFFNEIIYLFKLTLQMRNSVTNSDIDYILSPIKDKNGNFYDSRNKIDTLPKDADANGAYNIARKGLMLVNQIKQANDITKFKCKPITNAEWLEFVQKKDT

SEQ ID NO: 1657 - protein, 1238 aa, unidentified
  REGION 1..1238: note = Description of Unknown: uncultivated organism sequence
  REGION 1..1238: note = Category: MG75 effectors
  REGION 1..1238: note = Description: MG75-143 effector
MSNLYSNLHNLYQVQKTLRFELKPQGKTKENMEKVGILKADEHRAEIYSKVKKYCDEYHKLFIDKSLSNIELNGIDRYYELYSINNRDDKQKEELDQLEASLRKQISDAFKKSAEYKGLFQKDIITSYLVTMYKENQEKMQDIGEFNRFTTYFTGYNKNRENMYSEEDKSTAISYRLINENLPTFIDNIKIYKKIVSLMPEDIEKIYKDLEEYIQVDSIDEIFNISYYNDVLTQRGIECYNILISGRTKNDGDKIKGLNEYINEFNQTHNEKIPKLQELYKQILSDAESASFKIDVIKNDKELMNLIEVYYANILPILNKIEDLFTRISNYNLELILVNNDGTLSTLSNMVFNEWSYIKGAISEKYDEEYSGKEKYGTEKYAQKKQEYLKKQKIYSLKFLNDCIGNNAICEYLKNYIIQNKNIETIKEDYNEVQNIKVEDDTKELIKDEKSIEKIKKFLDDVKSLQEFVKLVIPKDRTVEKDAKFYSELTPYYEKIKEIIPLYNKVRNYVTQKPYSTEKIKLNFECPTLLKGWDANKEEANLGVILLKEGKYYLGIINPYCKKIFEVDEKDSNEQNNYKKMEYKLLPGPNKMLPKVFFSNSRIEEFNPSKELQEKYNKGYHKKGKDFDINFCHELIDFYKQSVNKHEDWKKFNFKFKDTSEYNDISEFYREVEKQGYKIEYTEYSEKYINELVDRGELYLFQIYNKDFSEYSKGKENLHTLYWKAVFDPDNIMNPVYKLNGNAEVFYRKKSLEMKVTHPANQPIANKNISTIEAGRSTSTFKYDLIKDKRYTMDKFQFHVPITMNFKSERLFNINQIVNKYLKYNDDIHVIGIDRGERNLLYVCVIDKNEKIVYQKSLNEIVSEYNNNRYTTDYHGLLDRKEKEREIAREDWKNIENIKELKEGYMSQVIHILVELMKKYNAIIVIEDLNKGFKNSRIKVEKQVYQKFEKMFIDKLNYLVFKDEDKMNEGGVLNAYQLTNKFESFTKLGKQSGILYYIPAWCTSKIDPTTGFINRFYLKYENFDKSKEFVNRIDDIRYNEKENLFEFDIDYSKFTDRLNDTKNKWTLCSYGERILTQKNANGEWLDRRIQLSIEFKKLFEKYGINLNNIKDSILKLDKDNLEFYKGNGESLGFIQLFKLMVQMRNSLTGKEEDNLISPVKNQHGKFFNTSEKIEGLPIDADANGAYNIARKGFMLVEQMKNVEDEKLNKIKYNITEKEWLNYVQNRGMWWKRQYLYHI

SEQ ID NO: 1658 - protein, 1286 aa, unidentified
  REGION 1..1286: note = Description of Unknown: uncultivated organism sequence
  REGION 1..1286: note = Category: MG75 effectors
  REGION 1..1286: note = Description: MG75-144 effector
MKQKKTQNPFNQFIGLYPLSKTLRFELRPYNEKTKNNIISAGILAEDNHRAESYKKVKKIIDEYHKAFIERVLKDLVLEEKPLQAFYECYKKSSKEEALQEIGNNLRTQISNAFEKDPKYSTLTSKDLINKELPSIVTTEEERTLLEEFHGFSTYFVGFHQNRENMYSDEEKATSIAYRLINENLPKFIDNIRSFQKIADSPIADKLESIYDEYAKEGYMNVNTLNEMFEISFYNRVLTQTQIDLYNAIIGGKTEKDGHKTQGINEYINLYNQRGEVQKKDRLPLLKPLFKQILSDREHISWFEEGFADDQAMLNAIKDFYLELTETGPTTTESILDRTKSLLRTIADYDLTKIYLGYNSLSKISQQIFGEWDRIQRALEAEYDQREKTKTYEEKEKHFKSLKSVSIGFIDDCLKAFETDKQLSLSIKEYIAQLGKKNDDPDLIDRITASYKAVKAILTTEWPKERNIAQEKDIVALIKDLLDRIKDLQSFIKPLLGSGKESDKDNLFYGELASIWETINTVTPLYDKVRNRMTRKPYSTQKFKVNFRNSQLLKGWDLNKEKDYMGIILRKKDLYFLAIMNKKNTKVFSSKVPSQGECFEKMIYKQFDATKQVPKCSTELKRVKEAIEIDDKPYYELFDKQKFSKPLTITREIWQLNNLVWDKKTNSFVRRKKDETRPKKFQQEYLDITEDREGYCEALRKWIDFVKDFLASYKSTSIYNIKYKDSSEYASIKEFYNFLDQELYHIEFSNVSVDYINELIEEGKIYLFQIYNKDFSPHSKGTPNMHTLYWKTLFDERNLANVAYKLNGEAEIFFRKASLERKVTHPAHDPIKTKNPKTSIKEKAFAYDLIKDKRYTEDKFQLHVPITMNFKSPMEKKGINSRVNNYIKTAEDLHFIGIDRGERNLLYVCVIDSQGNIKDQYSLNEIVNQYNRTDYKYLLEKREEERDKERKSWQTIENIKDLKQGYLSQVVHKIAQLMVQYHAIVVLEDLNSGFKRSRQKVEKSVYQQFEKSLIDKLNYLIDKRLPIDEEGGVLRAYQLTNKFESFKTMKMQNGFLFYIPAWNTSKMDPTTGFVNLFDTRYTNIDKSKEFFDKFEAIRYNEGKDWFELEFDYEHFTTKAEGTQTQWTLCTWGERINTFRNKSKNSSWDYKKINLTEEYKTLFEQFSINYRGNLKKEILEQNSKDFFERLLSLLHLTLQMRNSIPNTDTDYLISPVADANGHFYYSEQCGDNLPKNADANGAYNIARKGMWMAEQIRRSNEGEELKLAISNKEWLRFAQEKPYLEDK

SEQ ID NO: 1659 - protein, 1228 aa, unidentified
  REGION 1..1228: note = Description of Unknown: uncultivated organism sequence
  REGION 1..1228: note = Category: MG75 effectors
  REGION 1..1228: note = Description: MG75-145 effector
MSNLYSKCHKLYSLSKTLRFELKPIGKTKENFENYILTSDEEKSEKFKKVKLYCDEYHKKFINDCLENFQNDKFIEVLNKYYELYIKNNRSDKENNEFEKTQELLRKIIAETFTKNKKYSGLFGKELFKNYLPEYYKNDKEKLSEIKLFSEFTTYFAGYNKNRENMYSAEEKTTAISYRLINQNLPTYIKNIQNYNKIKEHIPTINETISHKLQVDIEKYFNLEYFENILTQDAIDKYNYIIGGKSLDDGTKIQGINEFINLYNQTNPDKKLPKLKILYKQILSDKTNISFKIDKIENDSELIYLINNYYNILSPLIYSNDNKDTGFIKTIKDITQFDTNKIWVMTDNLTYLSQQVYKDWNYINHLIEEKYNQENLKNNKKINEKFLEKRDKELKKIKEYSLHDIEQLIIQNDKNLKIKNQGKLYKYITEKTIEIINNIKLSHSECEYILNTNYEPNSKQLLNDTDKITKIKTLLDNIKLLQTTIKFLIPKSVGIQIDDTFYNAINYDILSEIIPIYNKTRNYVTQKPYSIEKFPLTFNCPTLLDGWDLNKEESNLSILLEKDGYYYLGIMNKKDNKIFRKLPEPQSNEQIYKKYEYKLLPGPNKMLPKVFFSNSRIDEFNPSEELLRKYQEGRHKKGNNFDIIFCRELIDFYKKSLFIHNDWKLFNFKFNDTNSYEDISQFYKQVEEQGYKISTQNISTRYIDELVENGKLFLFQIYNKDFSTYSKGTPNLHTMYWKELFDEDNLKDVVYKLNGGAEIFYRKKSIEDKITHPKNQTIKNKNELNHKKESLFQYDLIKDKRFTMDKFLFHVPITLNFKNQKLEYINELINSEIQRKTDINIIGVDRGERNLIYITVIDSNGKLLEQLSLNEIINEYKNETYKTDYHSLLDKKEKERNEARKSWGTIKNIKELKEGYMSQVIHKITDLMIKYNAIIVLEDLNSGFKNSRKKVEKQVYDKFETMLTNKLSYLIDKKLDKNNDGGILNAYQLVNKETKGRQSGVLFYIPAWNTSKIDPVTGFVNLFYIKNMSIDKSKEFFNKFEDIRYNTKEDFFEFDIDYSKFTDKVYGIRKNWTICTYGERIRTFRNKDKNNEWDNEEINLTEKFKNLFNQYSINLSNIQEDIQKQTDRNFFNEIIYLFKLTLQMRNSVTNSEIDYILSPIKDKNGNFYDSRNRIDTLPKDADANGAYNIARKGLMLVNQIKQANDITKFKCKPITNAEWLEFVQKKDI

SEQ ID NO: 1660 - protein, 1250 aa, unidentified
  REGION 1..1250: note = Description of Unknown: uncultivated organism sequence
  REGION 1..1250: note = Category: MG75 effectors
  REGION 1..1250: note = Description: MG75-146 effector
MQFQDFTNQYAVSKTLSFELIPQGRTLEHVEAKGLLSEDEHRSESYKTVKTVIDRYHKQFIEEALSGFELDELETYQTLYNIANKTSEDQKCFIAIQDTMRKSIVKHIKQHPKFSILDKKELIRDELFTYCENDAEKAMVLEFYKFTTYFSGFNDNRKNMYSDEEKSTAIAYRIVHQNLPKFIDNLKTFSLISNVLSENIKTLNTELQNVLGNMIINDIFALNFFNQTLTQKGIDRYNTLLGGFTDQNNPKKKIKGLNEYINQYNQTLPKTGKIGKLKPLYKQILSDRESISFLPETLQTGQDVLTALRCYYESNLADVINEYGNDGKTLKEVFENLSNYDLSGVFIRNDASIADVSQKIFGNWNIIQQAFDLRYDQTYTGKKSKKPEKYEDERKKYFKNIQSFSIESINEALTYLNDKTKHKQIEKFFSGLGIRENKNNLITIINKAYEDLEKVLGIPYPTDKELSQDTRTVEKIKTFLDSVKALQWFTKLILGKGTEPNKDSLFYGDLLPLWNEIDKITPLYNSIRNYMTKKPYSTEKIKLNFQNATLLAGWDVNQERANTSLIFLKNGLYYLGIMDQEYNKSFIDLPVLPMTTADDVYQKMEYKQLPGPEKMLPKVFFSKARIDEFAPSERVLEIYKNGTFKKGDDFKLEDCHELIEFYKRAIAQHPAWNQFNHQFSKTSAYQNIGEFYNDVKQQGYKITYRDVPVEYMNQLINDGQLYLFQIYNKDFSPHSKGTPNMHTLYWKMIFDEQNLNDVVYKLDGGAEVFYRKASPGIKKTPTHPKNQAVANKNPLNPKKESIFDYDLIKNKRFTMDKFLLHVPIKMNFKANPMTNLNMSVRSYLKTQRKTNIIGIHRGERNLLYVAVINEKGEILEQQSLNTIMNKNNDISHTTDYHDLLDRKEKERDTARKNWQTIENIKELKEGYLSQVIHKITQLMVKYQAIVVVEDLDMGFMQGRQKVEKQVYQKFEKMLISKLQYLVDKKAPIKQPGGLLKALQLTKNETAGQGKNSYEKQNGFLFYVPAWNTSSIDPTTGFVNLFKSSDLRYESINKSKTFINLIDKMQYSTSAQHFEFNIDYDKFTEKAQGTRTDWMICTHGKRIRSFRNAETNNQWCTEEIDLTQAFRQLLDDNEIDYQSQTLKEDILQMNTRAFFVAFLDIFRLILQLRNRKENGDYLISPVKNSTGEFFDSRDKRNGLPENEDANGAYNIARKGAWIIDAIKDADDDKLNRVKMTMSNKDWLTYAQAHLI

SEQ ID NO: 1661 - protein, 1255 aa, unidentified
  REGION 1..1255: note = Description of Unknown: uncultivated organism sequence
  REGION 1..1255: note = Category: MG75 effectors
  REGION 1..1255: note = Description: MG75-147 effector
MTLIIKYKESKNKREVYMSNLYSNLHNLYQVQKTLRFELKPQGKTKENMEKVGILEADEHRAEIYSKVKKYCDEYHKLFIDKSLSNIELNGIDRYYELYSINNRDDKQKEELDQLETGLRKQISDAFKKSAEYKGLFQKDMITSYLVTMYKENQEKMQDIGEFNRFTTYFTGYNKNRENMYSEEDKSTAISYRLINENLPTFIDNIKIYKKIVSLMPEDIEKIYKDLEEYIQVDSIDEIFNISYYNDVLTQRGIECYNILISGRTKNDGDKIKGLNEYINEFNQTHNEKIPKLQELYKQILSDAESASFKIDVIKNDKELMNLIEVYYANILPILNKIEDLFTRISNYNLELILVNNDGTLSTLSNMVFNEWSYIKGAISEKYDEKYSGKEKYGTEKYAQKKQEYLKKQKIYSLKFLNDCIGNNAICEYLKNYIIQNKNIETIKEDYNEVQNIKVEDDTKELIKDEKSIEKIKKFLDDVKSLQEFVKLVIPKDRTVEKDAKFYSELTPYYEKIKEIIPLYNKVRNYVTQKPYSTEKIKLNFECPTLLNGWDANKEEANLGVILIKEGKYYLGIINPYCKKIFEIDEKDSNEQKNYKKMEYKLLPGPNKMLPKVFFSNSRIEEFNPSKELQEKYNKGYHKKGKDFDINFCHELIDFYKMSLNKHEDWKKFNFKFKDTSEYNDISEFYREVEKQGYKIEYTEYSEKYINELVDRGELYLFQIYNKDFSEYSKGKENLHTLYWKAVFDPDNIMNPVYKLNGNAEVFYRKKSLEMKVIHPANQPIANKNISTIEAGRSTSTFKYDLIKDKRYTMDKFQFHVPITVNFKSERLFNINQIVNKYLKYNDDIHVIGIDRGERNLLYVCVIDKNEKIVYQKSLNEIVSEYNNNRYTTDYHGLLDRKEKEREIAREDWKNIENIKELKEGYMSQVIHILVELMKKYNAIIVIEDLNKGFKNSRIKVEKQVYQKFEKMFIDKLNYLVFKDEDKMNEGGVLNAYQLTNKFESFTKLGKQSGILYYIPAWCTSKIDPTTGFINRFYLKYENFDKSKEFVNRIDDIRYNEKENLFEFDIDYSKFTDRLNDTKNKWTLCSYGERILTQKNANGEWFDRRIQLSIEFKKLFEKYGINLNNIKDSILKLDKDNLEFYKGNGESLGFIQLFKLMVQMRNSLTGKEEDNLISPVKNRHGKFFNTSEKIEGLPIDADANGAYNIARKGFMLVEQMKNVEDEKLNKIKYNITEKEWLNYVQNRGMWWKRQYLYHI

SEQ ID NO: 1662 - protein, 1236 aa, unidentified
  REGION 1..1236: note = Description of Unknown: uncultivated organism sequence
  REGION 1..1236: note = Category: MG75 effectors
  REGION 1..1236: note = Description: MG75-148 effector
MKQLSELTGLYSLSKTLRFELKPIGKTLEHIESKGLIAQDEQRAEEYKKVKDIIDRYHKKFITMCLSDFKFEQNSLETYVALAEDTNRDEKAFDEIKKTLRKQIVETFKKGGAYSDLFKKKLIQKHLPEFVSDEEEKKMIANFSKFTTYFNGFNENRKNMYSDEDKSTAIAYRLIHENLPMFVNNMKSFSRIADSDVHQHFTEIESSFSEYLGVEHLEEMFQLDYFSETLTQEQIAVYNHIIGGRALEDGTKLKGINEYVNLYNQQHKNSRLPLLKPLYKMILSDRVALPWFPSEEFASDEEMIRAINETYNTLKEVLSIDGDSSLRSLLLNISSYDIKHIYIANDLGLTDISQQMFGQYDVYTSAIKQELREKNAPTAKERRNPELYDERINKLFKSAKSFSIEHLNSLVDSEHTIQNYYKHLGAYDRNGEQRVNLFTQIEMAYVAAKEILSGKHGNISQSDAETAIIKGLLDAFKSLQRFIKPLLGNGEEADKDNEFDAKLREAWNTLDIVTPLYNKVRNWLTRKPYSTEKIKLNFENAQLLGGWDVNKEPDCTSILLRKNGLYYLAIMNKKYNHAFDIDNLPNDGKCYEKIDYKLLPGANKMLPKVFFSKSRIKEFAPSEIIVNAYKKGSHKKGANFSISDCRRLIDFFKASISKHEDWKNFPFSFSSTETYEDISGFYREVEQQGYMLGFRNVSESFIKQLVDEGKLYLFQIWNKDFSDFSKGTPNMHTLYWKMLFDEHNLANVVYKLNGQAEVFYRKSSLDVANTTIHKAHQPIMNKNQENKKRQSTFDYDIIKNRRYTVDKFQFHVPISINFKATGRDNVNDNVLDIIRNGGIKHIIGIDRGERHLLYLSLIDLKGNIVKQMTLNDIVNEYNGNTYATNYKNLLAEREGNRTEARKNWKKIENIKDIKKGYLSQVVHIISKMMVEYNAIVVLEDLNMGFMRGRQKIERSVYEQFEKMLIDKLNYYVDKQKNSDEAGGLLHALQLTSKFESFKKLGKQSGCLFYIPAWNTSKIDPVTGFVNLFDTRYTNADQARKFFSQFDSIRYNADKDWFEFAFDYNKFTAKAKGTRTKWTLCTYGTRIRTFRNSERLNQWDNEEVVLTDEFKKAFANADINIHGNLKEAICSLQDKKYLEPLMHLMKLLLQMRNSITNSEVDYLLSPVADENGTFYDSRICSASLPKDADANGAYNIARKGLWAIHQIQETPAGDRPNLAIKNKDWLNFAQQKPYMNE

SEQ ID NO: 1663 - protein, 1245 aa, unidentified
  REGION 1..1245: note = Description of Unknown: uncultivated organism sequence
  REGION 1..1245: note = Category: MG75 effectors
  REGION 1..1245: note = Description: MG75-149 effector
MTLIIKYKESKNKREVYMSNLYSNLHNLYQVQKTLRFELKPQGKTKENMEKVGILEADEHRAEIYSKVKKYCDEYHKLFIDKSLSNIELNGIDRYYELYSINNRDDKQKEELDQLEASLRKQISDAFKKSAEYKGLFQKDIITSYLVTMYKENQEKMQDIGEFNRFTTYFTGYNKNRENMYSEEDKSTAISYRLINENLPTFIDNIKIYKKIVSLMPEDIEKIYKDLEEYIQVDSIDEIFNISYYNDVLTQRGIECYNILISGRTKNDGDKIKGLNEYINEFNQTHNEKIPKLQELYKQILSDAESASFKIDVIKNDKELMNLIEVYYANILPILNKIEDLFTRISNYNLELILVNNDGTLSTLSNMVFNEWSYIKGAISEKYDEEYSGKEKYGTEKYAQKKQEYLKKQKIYSLKFLNDCIGNNAICEYLKNYIIQNKNIETIKEDYNEVQNIKVEDDTKELIKDEKSIEKIKKFLDDVKSLQEFVKLVIPKDRTVEKDAKFYSELTPYYEKIKEIIPLYNKVRNYVTQKPYSTEKIKLNFECPTLLNGWDANKEEANLGVILLKEGKYYLGIINPYCKKIFEVDEKDSNEQNNYKKMEYKLLPGPNKMLPKVFFSNSRIEEFNPSKELQEKYNKGYHKKGKDFDINFCHELIDFYKQSLNKHEDWKKFNFKFKDTSEYNDISEFYREVEKQGYKIEYTEYSEKYINELVDRGELYLFQIYNKDFSEYSKGKENLHTLYWKAVFDPDNIMNPVYKLNGNAEVFYRKKSLEMKVTHPANQPIANKNISTIEAGRSTSTFKYDLIKDKRYTMDKFQFHVPITMNFKSERLLNINQIVNKYLKYNDDIHVIGIDRGERNLLYVCVIDKNEKIVYQKSLNEIVSEYNNNRYTTDYHGLLDRKEKEREIAREDWKNIENIKELKEGYMSQVIHILVELMKKYNAIIVIEDLNKGFKNSRIKVEKQVYQKFEKMFIDKLNYLVFKDEDKMDEGGVLNAYQLTNKFESFTKLGKQSGILYYIPAWCTSKIDPTTGFINRFYLKYENFDKSKEFVNRIDDIRYNEKENLFEFDIDYSKFTDRLNDTKNKWTLCSYGERILTQKNANGEWFDRRIQLSIEFKKLFEKYGINLNNIKDSILKLDKDNLEFYKGNGESLGFIQLFKLMVQMRNSLTGKEEDNLISPVKNQHGKFFNTSEKIEGLPIDADANGAYNIARKGFMLVEQMKNVEDEKLNKIKYNITEKEWLNYVQNRGM

SEQ ID NO: 1664 - protein, 1245 aa, unidentified
  REGION 1..1245: note = Description of Unknown: uncultivated organism sequence
  REGION 1..1245: note = Category: MG75 effectors
  REGION 1..1245: note = Description: MG75-150 effector
MTLTIKYKESKNKREVYMSNLYSNLHNLYQVQKTLRFELKPQGKTKENMEKVGILEADEHRAEIYSKVKKYCDEYHKLFIDKSLGNIELNGIDRYYELYSINNRDDKQKEELDQLEASLRKQISDAFKKSAEYKGLFQKDIITSYLVTMYKENQEKMQDIGEFNRFTTYFTGYNKNRENMYSEEDKSTAISYRLINENLPTFIDNIKIYKKIVSLMPEDIEKIYKDLEEYIQVDSIDEIFNISYYNDVLTQRGIECYNILISGRTKNDGDKIKGLNEYINEFNQTHNEKIPKLQELSKQILSDAESASFKIDVIKNDKELMNLIEVYYANILPILNKIEDLFTRISNYNLELILVNNDGTLSTLSNMVFNEWSYIKGAISEKYDEKYSGKEKYGTEKYAQKKQEYLKKQKIYSLKFLNDCIGNNAICEYLKNYIIQNKNIETIKEDYNEVQNIKVEDDTKELIKDEKSIEKIKKFLDDVKSLQEFVKLVIPKDRTVEKDAKFYSELTPYYEKIKEIIPLYNKVRNYVTQKPYSTEKIKLNFECPTLLNGWDANKEEANLGVILIKEGKYYLGIINPYCKKIFEVDEKDSNEQNNYKKMEYKLLPGPNKMLPKVFFSNSRIEEFNPSKELQEKYNKGYHKKGKDFDINFCHELIDFYKQSLNKHEDWKKFNFKFKDTSEYNDISEFYREVEKQGYKIEYTEYSEKYINELVDRGELYLFQIYNKDFSEYSKGKENLHTLYWKAVFDPDNIMNPVYKLNGNAEVFYRKKSLEMKVIHPANQPIANKNISTIEAGRSTSTFKYDLIKDKRYTMDKFQFHVPITVNFKSERLFNINQIVNKYLKYNDDIHVIGIDRGERNLLYVCVIDKNEKIVYQKSLNEIVSEYNNNRYTTDYHGLLDRKEKEREIAREDWKNIENIKELKEGYMSQVIHILVELMKKYNAIIVIEDLNKGFKNSRIKVEKQVYQKFEKMFIDKLNYLVFKDEDKMNEGGVLNAYQLTNKFESFTKLGKQSGILYYIPAWCTSKIDPTTGFINRFYLKYENFDKSKEFVNRIDDIRYNEKENLFEFDIDYSKFTDRLNDTKNKWTLCSYGERILTQKNANGEWLDRRIQLSIEFKKLFEKYGINLNNIKDSILKLDKDNLEFYKGNGESLGFIQLFKLMVQMRNSLTGKEEDNLISPVKNRHGKFFNTSEKIEGLPIDADANGAYNIARKGFMLVEQMKNVEDEKLNKIKYNITEKEWLNYVQNRGM

SEQ ID NO: 1665 - protein, 1255 aa, unidentified
  REGION 1..1255: note = Description of Unknown: uncultivated organism sequence
  REGION 1..1255: note = Category: MG75 effectors
  REGION 1..1255: note = Description: MG75-151 effector
MTLTIKYKESKNKREVYMSNLYSNLHNLYQVQKTLRFELKPQGKTKENMEKVGILEADEHRAEIYSKVKKYCDEYHKLFIDKSLGNIELNGIDRYYELYSINNRDDKQKEELDQLEASLRKQISDAFKKSAEYKGLFQKDIITSYLVTMYKENQEKMQDIGEFNRFTTYFTGYNKNRENMYSEEDKSTAISYRLINENLPTFIDNIKIYKKIVSLMPEDIEKIYKDLEEYIQVDSIDEIFNISYYNDVLTQRGIECYNILISGRTKNDGDKIKGLNEYINEFNQTHNEKIPKLQELSKQILSDAESASFKIDVIKNDKELMNLIEVYYANILPILNKIEDLFTRISNYNLELILVNNDGTLSTLSNMVFNEWSYIKGAISEKYDEKYSGKEKYGTEKYAQKKQEYLKKQKIYSLKFLNDCIGNNAICEYLKNYIIQNKNIETIKEDYNEVQNIKVEDDTKELIKDEKSIEKIKKFLDDVKSLQEFVKLVIPKDRTVEKDAKFYSELTPYYEKIKEIIPLYNKVRNYVTQKPYSTEKIKLNFECPTLLNGWDANKEEANLGVILIKEGKYYLGIINPYCKKIFEVDEKDSNEQNNYKKMEYKLLPGPNKMLPKVFFSNSRIEEFNPSKELQEKYNKGYHKKGKDFDINFCHELIDFYKQSLNKHEDWKKFNFKFKDTSEYNDISEFYREVEKQGYKIEYTEYSEKYINELVDRGELYLFQIYNKDFSEYSKGKENLHTLYWKAVFDPDNIMNPVYKLNGNAEVFYRKKSLEMKVIHPANQPIANKNISTIEAGRSTSTFKYDLIKDKRYTMDKFQFHVPITVNFKSERLFNINQIVNKYLKYNDDIHVIGIDRGERNLLYVCVIDKNEKIVYQKSLNEIVSEYNNNRYTTDYHGLLDRKEKEREIAREDWKNIENIKELKEGYMSQVIHILVELMKKYNAIIVIEDLNKGFKNSRIKVEKQVYQKFEKMFIDKLNYLVFKDEDKMNEGGVLNAYQLTNKFESFTKLGKQSGILYYIPAWCTSKIDPTTGFINRFYLKYENFDKSKEFVNRIDDIRYNEKENLFEFDIDYSKFTDRLNDTKNKWTLCSYGERILTQKNANGEWLDRRIQLSIEFKKLFEKYGINLNNIKDSILKLDKDNLEFYKGNGESLGFIQLFKLMVQMRNSLTGKEEDNLISPVKNRHGKFFNTSEKIEGLPIDADANGAYNIARKGFMLVEQMKNVEDEKLNKIKYNITEKEWLNYVQNRGMWWKRQYLYHI

SEQ ID NO: 1666 - protein, 1236 aa, unidentified
  REGION 1..1236: note = Description of Unknown: uncultivated organism sequence
  REGION 1..1236: note = Category: MG75 effectors
  REGION 1..1236: note = Description: MG75-152 effector
MKQLSELTGLYSLSKTLRFELKPIGKTLEHIESKGLIAQDEQRAEEYKKVKDIIDRYHKKFITMCLSDFKFEQNSLETYVALAEDTNRDEKAFDEIKKTLRKQIVETFKKGGSYSDLFKKELIQKHLPEFVSDEEEKKMIANFSKFTTYFNGFNENRKNMYSDEDKSTAIAYRLIHENLPMFVNNMKSFSRIADSDVHQHFTEIESSFSEYLGVEHLEEMFQLDYFSETLTQEQIAVYNHIIGGMALEDGTILKGINEYVNLYNQQHKNSRLPLLKPLYKMILSDRVALPWFPSEEFASDEEMIRAINETYNTLKEVLSIDGDSSLRSLLLNISSYDIKHIYIANDLGLTDISQQMFGQYDVYTSAIKQELRKKNAPTAKERRNPELYDERINKLFKSAKSFSIEHLNSLVDSEHTIQNYYKHLGAYDRNGEQRVNLFTQIEMAYVAAKEILSGKHGNISQSDAETAIIKGLLDAFKSLQRFIKPLLGNGEEADKDNEFDAKLREAWNTLDIVTPLYNKVRNWLTRKPYSTEKIKLNFENAQLLGGWDVNKEPDCTSILLRKDGLYYLAIMNKKYNHAFDIDNLPNDGKCYEKIDYKLLPGANKMLPKVFFSKSRIKEFAPSEIIVNAYKKGSHKKGANFSISDCRRLIDFFKASISKHEDWKNFPFSFSSTETYEDISGFYREVEQQGYMLGFRNVSESFIKQLVDEGKLYLFQIWNKDFSDFSKGTPNMHTLYWKMLFDEHNLANVVYKLNGQAEVFYRKSSLDVANTTIHKAHQPIMNKNQENKKRQSTFDYDIIKNRRYTVDKFQFHVPISINFKATGRDNVNDNVLDIIRNGGIKHIIGIDRGERHLLYLSLIDLKGNIVKQMTLNDIVNEYNGNTYATNYKNLLAEREGNRTEARKNWKKIENIKDIKKGYLSQVVHIISKMMVEYNAIVVLEDLNMGFMRGRQKIERSVYEQFEKMLIDKLNYYVDKQKDSDEAGGLLHALQLTSKFESFKKLGKQSGCLFYIPAWNTSKIDPVTGFVNLFDTRYTNADQARKFFSQFDSIRYNADKDWFEFAFDYNKFTAKAKDTRTKWTLCTYGTRIRTFRNPERLNQWDNEEVVLTDEFKKAFANADVNIHGNLKEAICSLQDKKYLEPLMHLMKLLLQMRNSITNSEIDYLLSPVADENGTFYDSRVCSASLPKDADANGAYNIARKGLWAIHQIQESPAGDRLNLAIKNKDWLNFAQQKPYMNE

SEQ ID NO: 1667 - protein, 1267 aa, unidentified
  REGION 1..1267: note = Description of Unknown: uncultivated organism sequence
  REGION 1..1267: note = Category: MG75 effectors
  REGION 1..1267: note = Description: MG75-153 effector
MKNFIAKYSVSKTLRFELKPIGKTLENIQKNGLISKDEMLAENYKEMKKTIDEFHKEFIHKTLSNASLDKENLKEIAELYTAPAEKRKEDNYKNQLKAYQKALRKEIVDHFKNDELFKNLFAEKLIKNHLQGFAQQKGLRFYSEFNNFTTYFVGFHENRKNIYTDEDKRTSIAYRLIHENLPKFIHNIAVFEKIQEKKIPLTILENQFMSKLGNDTLADVFRLEYYNCLLTQNSIDFINQLIGGYVNENQEKIQGLNEYINLYNQQQKDKKDRLPKMKMLYKQILSDRESISFLPQSFKESQEVLDAIRDYYLSNLLEYRAEDKEEPENVLEKIQERLSHIADYDLSKIYIRNDKAITDISQTIFGHWGLIHSALEFDFRQKNVGKKTTQKQEEDVEKYLKSDYYSIAEIENALISYKESTQNEKLVEVFNKTSHPIADYFKTYFKAKEKSKEGKEYTLIANIQAKYTCVEGLLNTDYPKDKKLHTDKDNLRNLKAFLDAILELLHFVKPLIISKNDFLEKDENFYSSIEPYYKQLELLIPLYNKVRNFATQKPYSTEKIKLNFENSTLLNGWDKNKESDNTCVLFRKGEDFYLGIMNKKYNKIFENVPKPKSDTTFLKMEYKLLPGANKMLPKVFFSKKNIAYYAPDSEILRIRNHSTHTKDGEPQKGYEKQAFKLEDCHKMIDFFKSSIEKHPEWKNFNFTFSNTQSYQSIDEFYREVEEQGYSISFVEVDEEYINQCVNEGKLYLFQIYNKDFSKNKKSKGKPNLHTLYWKALFDPENLKDVIYKLNGEAEVFYRKKSISAENIIVHKAQKPIENKNPLNLTKYSIFQYDIIKDRHYTEDKFLFHVPITLNFKSKKGKENINQEVLDYLKENPDVNIIGIDRGERHLLYLTVINSKGQILHQESLNTLKNETYNIQTDYHALLHEKEKDRDKARKEWGVIENIKELKEGYLSAIIHNIAKLMVQYNAIVVMEDLNSGFKRGRIKVEKQVYQKFEKMLIEKLNYLVFKDVPNYEPGGLYNALQLTSKFESFEKLGKQSGFLFYIPAWNTSKIDPTTGFVNLFGGIKYESIHQAVNFFEKFQSIRYNTKEAYFEFAFDYNDFTTKAEGTKTQWTVCTHGERIINFRNTEKNSEWDSKTVQLTQQIKNLLNEYHIAYEQGQDIKPAITAQNDKKFFEELLKQFKNTLQMRNSVINSDVDYLISPVMNAKGEFFDTRKTDSTLPQNADANGAYHIAKKGLLHVQQIIDGVKKTDLTNKKWLKFVQNNL

SEQ ID NO: 1668 - protein, 1275 aa, unidentified
  REGION 1..1275: note = Description of Unknown: uncultivated organism sequence
  REGION 1..1275: note = Category: MG75 effectors
  REGION 1..1275: note = Description: MG75-154 effector
MRKFNEFVGLYPISKTLRFELKPIGKTLEHIQRNKLLEYDAVRADDYVKVKKIIDTYHKYLIDEALSGFTFETEADGRRNNSLSEYYWYYNLRKRNEQEQKTFKTIQNNLRKQIVDKLTQSEKYKRIDKKELITTDLPDFLTNESEKELVEKFKNFTTYFTEFHKNRKNMYSKEEKSTAIAFRLINENLPKFVDNIAAFEKVASSPLAEKINALYEDFKEYLNVEKISSVFRLEYYNELLTQKQIDLYNAIVGGRTEEDNRTQIKGLNQYINEYNQQQTDRSNRLPKLKPLYKQILSDRESVSWLPPKFDSDKELLTKIKECYDALSEKEKVFDKLESILKSLSTYDLSKIYISNDSQLSYISQKMFGRWDIIGKAIREDCAKRNPQKNRESLEKFAERIDKKLKAIDSISIGDVDECLAQLGEPYVKRVEDYFAAMGASEIGEEQIGQEFFKKNIEEAYESVKELLNNADNITDNNLMQDKGNVEKIKNLLDAIKDLQRFIKPLLGKGDEADKDGVFYGEFTSLWTKLDTVTPLYNMVRNYLTSKPYSTKKIKLNFENSHFLRGWAKDYNKKAGLIYEKAGLYYLAIVDKKISNDDKKLLHKNVDEDVASRIIFDFQKPDEKNTPRLFIYSKKNPITIAPAVDIYNLPIDSILDVWNKEKYKVEYRQQDQLGYEQALYSLIDYFKEGFSKHESYKHYDFKWKETNKYKDISEFYHDVEISCYEVKYDKVNWKTLLKFVDEGKLYLFQIYNKDFSDHSKGTPNMHTLYWKMLFDEENLKDVVYKLNGEAEVFFRKSSITVQSPTHPANSPIKNKNKDNKKKESKFEYDLIKDRRYTVDKFLLHVPITMNFKSVGGSNINQLVKRYIRSATDLHIIGIDRGERHLLYLTVIDSRGNIKEQFSLNEIVNEYNGNTYRTDYHELLDTREGELTEARRNWQTIQNIRELKEGYLSQVIHKISELAIKYNAVIVLEDLNFGFMRSRQKVEKQVYQKFEKMLIYKLNYLVDKKKPVTETGGLLKAYQLTGEFESFKTLGKQSGILFYVPAWNTSKIDPVTGFVNLFDTHYENIEKAKGFFDKFKSIRYNSDKDWSEFVVDDYTRFSPKAEGTRRDWTICTQGKRIQIYRNPQRNNEWEGREIDLTKAFEEHFEAYGIDISKDLREQINIQNKKEFFEELLRLLRLTLQMRNSMPSSDIDYLISPIADDTGRFFDSRKQAELKGNAVLPMNADANGAYNIARKGLLAIRKMKQEENDSAKISLAISNKEWLKFAQTKPYLED

SEQ ID NO: 1669 - protein, 1236 aa, unidentified
  REGION 1..1236: note = Description of Unknown: uncultivated organism sequence
  REGION 1..1236: note = Category: MG75 effectors
  REGION 1..1236: note = Description: MG75-155 effector
MKQLSELTGLYSLSKTLRFELKPIGKTLEHIESKGLIAQDEQRAEEYKKVKDIIDRYHKKFITMCLSDFKFEQNSLETYVALAEDTNRDEKAFDEIKKTLRKQIVETFKKGGSYSDLFKKELIQKHLPEFVSDEEEKKMIANFSKFTTYFNGFNENRKNMYSDEDKSTAIAYRLIHENLPMFVNNMKSFSRIADSDVHQHFTEIESSFSEYLGVEHLEEMFQLDYFSETLTQEQIAVYNHIIGGRALEDGTKLKGINEYVNLYNQQHKNSRLPLLKPLYKMILSDRVALPWFPSEEFASDEEMIRAINETYNTLKEVLSIDGDSSLRSLLLNISSYDIKHIYIANDLGLTDISQQMFGQYDVYTSAIKQELREKNAPTAKERRNPELYDERINKLFKSAKSFSIEHLNSLVDSEHTIQNYYKHLGAYDRNGEQRVNLFTQIEMAYVAAKEILSGKHGNISQSDAETAIIKGLLDAFKSLQRFIKPLLGNGEEADKDNEFDAKLREAWNTLDIVTPLYNKVRNWLTRKPYSTEKIKLNFENAQLLGGWDVNKEPDCTSILLRKNGLYYLAIMNKKYNHAFDIDNLPNDGKCYEKIDYKLLPGANKMLPKVFFSKSRIKEFAPSEIIVNAYKKGSHKKGANFSISDCRRLIDFFKASISKHEDWKNFPFSFSSTEKYEDISGFYREVEQQGYMLGFRNVSESFIKQLVDEGKLYLFQIWNKDFSDFSKGTPNMHTLYWKMLFDEHNLANVVYKLNGQAEVFYRKSSLDVANTTIHKAHQPIMNKNQENKKRQSTFDYDIIKNRRYTVDKFQFHVPISINFKATGRDNVNDNVLDIIRNGGIKHIIGIDRGERHLLYLSLIDLKGNIVKQMTLNDIVNEYNGNTYATNYKNLLAEREGNRTEARKNWKKIENIKDIKKGYLSQVVHIISKMMVEYNAIVVLEDLNMGFMRGRQKIERSVYEQFEKMLIDKLNYYVDKQKNSDEAGGLLHALQLTSKFESFKKLGKQSGCLFYIPAWNTSKIDPVTGFVNLFDTRYTNADQARKFFSQFDSIRYNADKDWFEFAFDYNKFTAKAKDTRTKWTLCTYGTRIRTFRNPARLNQWDNEEVVLTDEFKKAFANADINIHGNLKEAICSLQDKKYLEPLMHLMKLLLQMRNSITNSEVDYLLSPVADENGTFYDSRICSASLPKDADANGAYNIARKGLWAIHQIQESPAGDRLNLAIKNKDWLNFAQQKPYMNE

SEQ ID NO: 1670 - protein, 1236 aa, unidentified
  REGION 1..1236: note = Description of Unknown: uncultivated organism sequence
  REGION 1..1236: note = Category: MG75 effectors
  REGION 1..1236: note = Description: MG75-156 effector
MKQLSELTGLYSLSKTLRFELKPIGKTLEHIESKGLIAQDEQRAEEYKKVKDIIDRYHKKFITMCLSDFKFEQNSLETYVALAEDTNRDEKSFDEIKKTLRKQIVETFKKGGSYSDLFKKELIQKHLPEIVTDEEEKKMIANFSKFTTYFNGFNENRKNMYSDEDKSTAIAYRLIHENLPMFVDNMKSFSRIADSDVHQHFTEIESSFSEYLGVEHLEGMFQLDYFSETLTQEQIAVYNHIIGGRVLEDGTKLKGINEYVNLYNQQHKDSRLPLLKPLYKMILSDRVALPWFPSEEFASDEEMIGAINATYNTLKDVLSIDGDSSLRCLLLNISSYDIKHIYIANDLGLTDISQQMFGQYDVYTSAIKQELRTTNAPTAKERRTPELYDERINKLFKSAKSFSIEYLNSLVDSEHTIQNYYKHLGAYDRNGEQRVNLFTQIEMAYVAAKEILSGKHGNISQSDAETAIIKGLLDAFKSLQRFIKPLLGNGEEADKDNEFDAKLREAWNTLDIVTPLYNKVRNWLTRKPYSTEKIKLNFENAQLLGGWDVNKEPDCTSILLRKNGLYYLAIMNKKYNHAFDIDNLPNDGECYEKIDYKLLPGANKMLPKVFFSKSRIKEFAPSEIIVNAYKKGSHKKGANFSISDCRRLIDFFKASISKHEDWKNFPFSFSSTETYEDISGFYREVEQQGYMLGFRNVSESFIKQLVDEGKLYLFQIWNKDFSDFSKGTPNMHTLYWKMLFDEHNLANVVYKLNGQAEVFYRKRSLDVANTTIHKAHQPIMNKNQENKKRQSTFDYDIIKNRRYTVDKFQFHVPISINFKATGRDNVNDNVLDIIRNGGIKHIIGIDRGERHLLYLSLIDLKGNIVKQMTLNDIVNEYNGNTYATNYKNLLAEREGNRTEARKNWKKIENIKDIKKGYLSQVVHIISKMMVEYNAIVVLEDLNMGFMRGRQKIERSVYEQFEKMQIDKLNYYVDKQKNSDEAGGLLHALQLTSKFESFKKLGKQSGCLFYIPAWNTSKIDPVTGFVNLFDTRYTNADQARKFFFQFDSIRYNADKDWFEFAFDYNKFTAKAKDTRTKWTLCTYGTRIRTFRNPARLNQWDNEEVVLTDEFKKAFANADINIHGNLKEAICSLQDKKYLEPLMHLMKLLLQMRNSITNSEVDYLLSPVADENGTFYDSRVCSASLPKDADANGAYNIARKGLWAIHQIQESPAGDRPNLAIKNKDWLNFAQQKPYMNE

SEQ ID NO: 1671 - protein, 1236 aa, unidentified
  REGION 1..1236: note = Description of Unknown: uncultivated organism sequence
  REGION 1..1236: note = Category: MG75 effectors
  REGION 1..1236: note = Description: MG75-157 effector
MKQLSELTGLYSLSKTLRFELKPIGKTLEYIESKGLIAQDEQRAEEYKKVKDIIDRYHKKFITMCLSDFKFEQNSLETYVALAEDTNRDEKAFDEIKKTLRKQIVETFKKGGSYSDLFKKELIQKHLPEFVSDEEEKKMIANFSKFTTYFNGFNENRKNMYSDEDKSTAIAYRLIHENLPMFVNNMKSFSRIADSDVHQHFTEIESSFSEYLGVEHLEEMFQLDYFSETLTQEQIAVYNHIIGGRALEDGTKLKGINEYVNLYNQQHKNSRLPLLKPLYKMILSDRVALPWFPSEEFASDEEMIRAINETYNTLKEVLSIDGDSSLRSLLLNISSYDIKHIYIANDLGLTDISQQMFGQYDVYTSAIKQELREKNAPTAKERRNPELYDERINKLFKSAKSFSIEHLNSLVDSEHTIQNYYKHLGAYDRNGEQRVNLFTQIEMAYVAAKEILSGKHGNISQSDAETAIIKGLLDAFKSLQRFIKPLLGNGEEADKDNEFDAKLREAWNTLDIVTPLYNKVRNWLTRKPYSTEKIKLNFENAQLLGGWDVNKEPDCTSILLRKNGLYYLAIMNKKYNHAFDIDNLPNDGKCYEKIDYKLLPGANKMLPKVFFSKSRIKEFAPSEIIVNAYKKGSHKKGANFSISDCRRLIDFFKASISKHEDWKNFPFSFSSTETYEDISGFYREVEQQGYMLGFRNVSESFIKQLVDEGKLYLFQIWNKDFSDFSKGTPNMHTLYWKMLFDEHNLANVVYKLNGQAEVFYRKSSLDVANTTIHKAHQPIMNKNQENKKRQSTFDYDIIKNRRYTVDKFQFHVPISINFKATGRDNVNDNVLDIIRNGGIKHIIGIDRGERHLLYLSLIDLKGNIVKQMTLNDIVNEYNGNTYATNYKNLLAEREGNRTEARKNWKKIENIKDIKKGYLSQVVHIISKMMVEYNAIVVLEDLNMGFMRGRQKIERSVYEQFEKMLIDKLNYYVDKQKNSDEAGGLLHALQLTSKFESFKKLGKQSGCLFYIPAWNTSKIDPVTGFVNLFDTRYTNADQARKFFSQFDSIRYNADKDWFEFAFDYNKFTTKAKDTRTKWTLCTYGTRIRTFRNPARLNQWDNEEVVLTDEFKKAFANADINIHVNLKEAICSLQDKKYLEPLMHLMKLLLQMRNSITNSEVDYLLSPVADENGTFYDSRVCSASLPKDADANGAYNIARKGLWAIHQIQETPAGDRPNLAIKNKDWLNFAQQKPYMNE

SEQ ID NO: 1672 - protein, 1236 aa, unidentified
  REGION 1..1236: note = Description of Unknown: uncultivated organism sequence
  REGION 1..1236: note = Category: MG75 effectors
  REGION 1..1236: note = Description: MG75-158 effector
MKQLSELTGLYSLSKTLRFELKPIGKTLEHIESKGLIAQDEQRAEEYKKVKDIIDRYHKKFITMCLSDFKFEQNSLETYVALAEDTNRDEKAFDEIKKTLRKQIVETFKKGGSYSDLFKKELIQKHLPEFVSDEEEKKMIANFSKFTTYFNGFNENRKNMYSDEDKSTAIAYRLIHENLPMFVNNMKSFSRIADSDVHQYFTEIESSFSEYLGVEQLEEMFQLDYFSETLTQEQIAVYNHIIGGRALEDGTKLKGINEYVNLYNQQHKDSRLPLLKPLYKMILSDRVALPWFPSEEFASDEEMIRAINETYNTLKEVLSIDGDSSLRSLLLNISSYDIKHIYIANDLGLTDISQQMFGQYDVYTSAIKQELREKNAPTAKERRNPELYDERINKLFKSAKSFSIEHLNSLVDSEHTIQNYYKHLGAYDRNGEQRVNLFTQIKMAYVAAKEILSGKHGNISQSDAETAIIKGLLDAFKSMQRFIKPLLGNGEEADKDNEFDAKLREAWNTLDIVTPLYNKVRNWLTRKPYSTEKIKLNFENAQLLGGWDVNKEPDCTSILLRKNGLYYLAIMNKKYNHAFDIDNLPNDGKCYEKIDYKLLPGANKMLPKVFFSKSRIKEFAPSEIIVNAYKKGSHKKGANFSISDCRRLIDFFKASISKHEDWKNFPFSFSSTETYEDISGFYREVEQQGYMLGFRNVSESFIKQLVDEGKLYLFQIWNKDFSDFSKGTPNMHTLYWKMLFDEHNLANVVYKLNGQAEVFYRKSSLDVANTTIHKAHQPIMNKNQENKKRQSTFDYDIIKNRRYTVDKFQFHVPISINFKATGRDNVNDNVLDIIRNGGIKHIIGIDRGERHLLYISLIDLKGNIVKQMTLNDIVNEYNGNTYATNYKDLLAEREGNRTEARKNWKKIENIKDIKKGYLSQVVHIISKMMVEYNAIVVLEDLNMGFMRGRQKIERSVYEQFEKMLIDKLNYYVDKQKDSDEAGGLLHALQLTSKFESFKKLGKQSGCLFYIPAWNTSKIDPVTGFVNLFDTRYTNADQARKFFSQFDSIRYNADKDWFEFAFDYNKFTAKAKGTRTKWTLCTYGTRIRTFRNPERLNQWDNEEVVLTDEFKKAFANADINIHGNLKEAICSLQDKKYLEPLMHLMKLLLQMRNSITNSEIDYLLSPVADENGTFYDSRVCSASLPKDADANGAYNIARKGLWAIHQIQESPADDRLNLAIKNKDWLNFAQQKPYMNE

SEQ ID NO: 1673 - protein, 1284 aa, unidentified
  REGION 1..1284: note = Description of Unknown: uncultivated organism sequence
  REGION 1..1284: note = Category: MG75 effectors
  REGION 1..1284: note = Description: MG75-159 effector
MNTSNLSRFTNLYSISKTLRFELQPLGKTKDYIEKNGILMRDEKRAEDYKTVKGIIDEYHKKYIKGRLWDFKLPLASEGKHDSLEEYKALYEVSKRSEADEAAFKEVKDNLRSIIAKRLTSGKAYETIFKKELIREDLINSLEDEVEREIVSQFADFTTYFGGFHENRKNMYDAGEKSTAIAYRLIHQNLPKFMDNMKAFAKIAETSIAEHFADIYEGSKEMLNVGSIEEIFRLDYFSETLTQPHIEVYNSIIGKRVLEDGTEVKGINEYVNLYNQQQKDKRLPLLVPLYKQILSDREKLSWLAEEFDSDEKMLAAVNETYTHLHDLLMGNENESLRSLLLHLRDNDLEQINIANDLSLTDISQHLFGRYDVFTNGIKEELRVITPRKRKETDEQLEDRISKIFKTQKSFSIAFLNSLPQPAMEDGKARCIEDYFMALGAVNNETTQKENLFAQIENAYENAKSVLQMKETGDMLSQNKPAVSKIKALLDALKDLQHFIKPLLGSGEENEKDELFYGSFQMMWDELDAVTPLYNKVRNWLTRKPYSTEKIKLNFDNAQLLDGWDENKETTNASILLYKDGNYYLGIIKKEDRKILGSPMPTDGECYDKVVYKFFKDITTMVPKCTTQKKDVIAHFMHSDDDYILYDKKTFDAPVTITKEIYNLNNVLYNGIKKFQIEYLRSTGDKRGYEHAVFIWKSFCMHFLKAYKSTSIYNLALVEQQINSYYDLSSFYNAVNLLLYNLSYRKVSVNYIHSLVDEGKLYLFRIWNKDFSEYSKGTPNLHTLYWKMLFDERNLADVVYKLNGQAEVFYRKSSIQPEHRIVHPAGKPIANKNEHSKEPTSTFKYDIVKDRRYTVDKFQFHVPITINFKAAGQENINPVVLDAIRRGGFTHIIGIDRGERHLLYLSLIDLQGNIVEQMTLNEIINEYKGLKHKTNYHDLLAKREGERTEARRSWDTIENIKEMKEGYLSQVVHIISKMMVEYNAIVVLEDLNTGFMRSRQKIERQVYEKFEKMLIDKLNCYIDKQVGASDIAGLLHPLQLACEAKKWKRSHQCGCLFYIPAWNTSKIDPVTGFVNLFDTRYENAAKAKAFFGKFGSIRYNAEKDWFEFAFDYNDFTTKAEGTRTEWTLCTYRERIRTFRNPQKNHQWDDEEIVLTDAFKQLFDKYDIDMKGNLKEAICAQNDAQFFKDMMELMKLLLQMRNSITNSETDYLLSPVADEKGQFFDSRRGITTLPDNADANGAYNIARKGLWVIRKIQETAENEKPSLAITNKEWLQFAQTKPYLND

SEQ ID NO: 1674 - protein, 1274 aa, unidentified
  REGION 1..1274: note = Description of Unknown: uncultivated organism sequence
  REGION 1..1274: note = Category: MG75 effectors
  REGION 1..1274: note = Description: MG75-160 effector
MKKNLEKFIGLYHMDKTLRFELKPMGKTLENINNNGFIENDNHRADSYKKVKKLIDRYHKHYIESVLGDFKLNSIQLEAYYNLYTQQSKTEKEIKEFEAIQDKLRKSIADALKKDDRFKRIDKKELINEDLNVVLENDDERILVSEFQGFTSYFTGFHENRKNMYSDEAKSTAIAYRLIHENLPKFIDNIAIFKKVAETSVADKFSKLYKDFEEYLNVYNINEMFDLDYYSIVLTQKQIEVYNGIIGGKTLEDGTKVQGLNEYINLYNQQQNDKRASLPKLKPLFKQILSDREQLSWLQEEFKTGGDVLDAVKEYCEAYFMNVDEMIKVLLTSIANYDLSKIYIPNDLSLTDISQKMLGNWNVIPNAIEQDFRNRYIKKPEENEEKYSERISKLVKQEKSFSLAYINSCLSELDNADISTYFASLGAVNIPDKQTSSITTEISMYYNQLKPLFDIEYPKEKNLSQDKLTVMQLKNLLDAFKALQRFVKPLLGKGNEAEKDEKFYGELMQLWGIIDEITPLYNKVRNYATRKPYSTDKIKVNFENAQLLDGWDENKEENNAAIILLKDGLYYLGIVKKEHRNILKVDKPMPSNGECYDKVVYKFFKDITTMVPKCTTQMKAVKQHFENSSESYTLFDKKSFNAPVEITKEIFELNNVLYNGVKKFQIEYLRSTNDRAGYEHAVNLWKEFCMQFLKAYKSTAIYDLSSIEKDWAKYTDLSSFYGAVNLLLYNLSYKKVSVEYIDKLVEEDKMYLFQIYNKDFSEYSKGTPNMHTLYWKMLFDERNLKDVVYKLNGQAEIFFRKKSISMAKPTHPANKPIDNKNVLNKRKQSTFKYDLIKDKRYTLDKFQFHVPITINFKSGGDGKINIDVCKHIKDSNDMHFIGIDRGERHLLYLCVINSKGEIVEQYSLNEIVNEYKGNKYHTDYHHLLQERDKKRQEERTSWQTIEGIKELKQGYLSQVIHKISQLIVKYNALVILEDLNMGFKRSRQKVESSVYQQFEKALIDKLNYYVDKKTEPTEDGGLLRAYQLASKFDSFQKMGKQSGFIFYVPAWNTSKIDPVTGFVNLLDTRYESVAKSQKFFDDFDSIRYNGEKDWFELKFDYNKFTKKAEGTKTDWTLCTYGTRVETFRNSEKNANWDSREINLTDEWKALFDKYNIPLNCNLKDAIAQQTSKDFHNILLHLLKLTLQMRNSETGTDIDYMVSPIANEDGKFYDSRLCDKSLPENADANGAYNIARKGLWIAQQIKEAEDLKKVKLAITNKEWLQFAQQKPYLND

SEQ ID NO: 1675 - protein, 1284 aa, unidentified
  REGION 1..1284: note = Description of Unknown: uncultivated organism sequence
  REGION 1..1284: note = Category: MG75 effectors
  REGION 1..1284: note = Description: MG75-161 effector
MNTSNLSRFTNLYSISKTLRFELQPLGKTKDYIEKNGILMRDEKRAEDYKTVKGIIDEYHKKYIKGRLWDFKLPLASEGKHDSLEEYKALYEVSKRSEADEAAFKEVKDNLRSIIAKRLTSGKAYETIFKKELIREDLINSLEDEVEREIVSQFADFTTYFGGFHENRKNMYDAGEKSTAIAYRLIHQNLPKFMDNMKAFAKIAETSIAEHFADIYEGSKEMLNVGSIEEIFRLDYFSETLTQPHIEVYNSIIGKRVLEDGTEVKGINEYVNLYNQQQKDKRLPLLVPLYKQILSDREKLSWLAEEFDSDEKMLAAVNETYTHLHDLLMGNENESLRSLLLHLRDNDLEQINIANDLSLTDISQHLFGRYDVFTNGIKEELRVITPRKRKETDEQLEDRISKIFKTQKSFSIAFLNSLPQPAMEDGKARCIEDYFMALGAVNNETTQKENLFAQIENAYENAKSVLQMKETGDMLSQNKPAVSKIKALLDALKDLQHFIKPLLGSGEENEKDELFYGSFQMIWDELDAVTPLYNKVRNWLTRKPYSTEKIKLNFDNAQLLDGWDENKETTNASILLYKDGNYYLGIIKKEDRKILGSPMPTDGECYDKVVYKFFKDITTMVPKCTTQKKDVIAHFMHSDDDYILYDKKTFDAPVTITKEIYNLNNVLYNGVKKFQIEYLRSTGDKRGYEHAVFIWKSFCMHFLKAYKSTSIYNLALVEQQINSYYDLSSFYNAVNLLLYNLSYRKVSVNYIHSLVDEGKLYLFRIWNKDFSEYSKGTPNLHTLYWKMLFDERNLADVVYKLNGQAEVFYRKSSIQPEHRIVHPAGKPIANKNENSKEPTSTFKYDIVKDRRYTVEKFQFHVPITINFKAAGQENINPVVLDAIRRGGFTHIIGIDRGERHLLYLSLIDLQGNIVEQMTLNEIINEYKGLKHKTNYHDLLAKREGERTEARRSWDTIENIKEMKEGYLSQVVHIISKMMVEYNAIVVLEDLNTGFMRSRQKIERQVYEKFEKMLIDKLNCYIDKQVGASDIAGLLHPLQLACEAKKWKRSHQCGCLFYIPAWNTSKIDPVTGFVNLFDTRYENAAKAKAFFGKFGSIRYNAEKDWFEFAFDYNDFTTKAEGTRTEWTLCTYRERIRTFRNPQKNHQWDDEEIVLTDAFKQLFDKYDIDMKGNLKEAICAQNDAQFFKDMMELMKLLLQMRNSITNSETDYLLSPVADEKGQFFDSRRGITTLPDNADANGAYNIARKGLWVIRKIQETAENEKPSLAITNKEWLQFAQTKPYLND

SEQ ID NO: 1676 - protein, 1279 aa, unidentified
  REGION 1..1279: note = Description of Unknown: uncultivated organism sequence
  REGION 1..1279: note = Category: MG75 effectors
  REGION 1..1279: note = Description: MG75-162 effector
MSNFNEFTHLYQLSKTLRFELKPIGETLKHFNESGILDQDEHRAESYKKVKKLIDRYHKEFMEEALRDFVFQMDDEGKNNSLSEYFFLYSLGKRTEAQDNDFKDVKKNLREQIAKYFKASPKYKNLFKQELIKEDLCNNMQCNEEEQKLVEEFHNFTTYFTGFHENRKNMYSDEEKSTAIAFRLVHQNLPKFIDNIGVFDRVRNIDEIKAGIENLQKHFETEGLFKQGEKIEDFFTLDYYSRLAVQSRIEIYNAILGGKTTEKGEKIQGLNELINLYNQQHKETHLPKMKALFKQILSDRQAVSWIEESFKSDNEVLSSVNDFYENLKQNEIFERTKELLTSVGSYDLSKVYITNDQQLTSISQQLYGSWAVIENAILAEMQNETPRKKKEDAEKYNERLKKAYSNRSSFSIAYIDQCLEAVFGENRIPVEQHFANLGKAEIETEAECGKIKIPDVFTQIEQTYSAAKSLLCNPYPKDKHLSQSDEDIEKVKNLLDALKRFQHFIKPLTGSGDEAEKDEMFYGDLAELWTEIDQLNSLYNKVRNHLTGKPYSEEKLKLNFENATLLNGWDKNKEPDNTAIILRKDGLYYLAIMNKEHNRIFASDKLPNNGECYEKVIYKLLPGANKMLPKVFLSKKGIEVFKPSQEILAIYNNGTHKKGDTFNINDCHKLIDFFKESISKHNDWKNFDFHFSDTNSYEDLSGFYREVENQGYKITFQNISSDYIDNLVNEGKLYLFQIYNKDFSTKRDLSKHKEGTPNMHTLYWQMLFDERNLNDGVYQLNGHAEVFFRKKSLNYTKPTHPANQPIAKKNPHSKNETSQFTYDLIKDKRFTMDKFLFHVPITLNFKSGETDNINAKVRQWLQKADDVHIIGIDRGERHLLYLTVIDSKGNIKEQMSLNTIENKYNGNTYAFDYHNRLDEKEKERDKAKKSWKTVENIKELKEGYLSQAIHKITQLMLKYNAIIVLEDLNIGFMRGRQKVEKQVYQKFEKMLIDKLNYLADKKKDPSEVGGVLNAYQLTSKFESFTKLGRQSGFLFYIPAWNTSKIDPVTGFVNLFDTQYKSDGKAKMFFSKFKSISYNKDKNWFEFSFDYNDFTSKADGTKTEWTVCTNGERIENFRNGETSNQWGGRTINLSQKFKSLFDEYGIDFTKDLQNSICSQSKKGFFKQLLHLFKLTVQMRNSNTETEEEKGKKDFIISPVCVDDKYYNSDIEAEKGKDEEGNWKSELPVNADANGAYNIARKGLMILNHIKQSSDPSKKQEYDLTNKAWLNFVQKGSVEGK

SEQ ID NO: 1677 - protein, 1017 aa, unidentified
  REGION 1..1017: note = Description of Unknown: uncultivated organism sequence
  REGION 1..1017: note = Category: MG75 effectors
  REGION 1..1017: note = Description: MG75-163 effector
MFQLDYFSETLTQEQIAVYNHIIGGRALEDGTKLKGINEYVNLYNQQHKDSRLPLLKPLYKMILSDRVALPWFPSEEFASDEEMIRAINETYNTLKEVLSIDGDSSLRSLLLNISSYDIKHIYIANDLGLTDISQQMFGQYDVYTSAIKQELREKNAPTAKERRNPELYDERINKLFKSAKSFSIEHLNSLVDSELTIQNYYKHLGAYDRNGEQRVNLFTQIEMAYVAAKEILSGKHGNISQSDAETAIIKGLLDAFKSLQRFIKPLLGNGEEADKDNEFDAKLREAWNTLDIVTPLYNKVRNWLTRKPYSTEKIKLNFENAQLLGGWDVNKEPDCTSILLRKNGLYYLAIMNKKYNHAFDIDNLPNDGKCYEKIDYKLLPGANKMLPKVFFSKSRIKEFAPSEIIVNAYKKGSHKKGSNFSISDCRRLIDFFKASISKHEDWKNFPFSFSSTETYEDISGFYREVEQQGYMLGFRNVSESFIKQFVDEGKLYLFQIWNKDFSDFSKGTPNMHTLYWKMLFDEHNLANVVYKLNGQAEVFYRKSSLDVANTTIHKAHQPIMNKNQENKKRQSTFDYDIIKNRRYTVDKFQFHVPISINFKATGRDNVNDNVLDIIRNGGIKHIIGIDRGERHLLYLSLIDLKGNIVKQMTLNDIVNEYNGNTYATNYKDLLAEREGNRTEARKNWKKIENIKDIKKGYLSQVVHIISKMMVEYNAIVVLEDLNMGFMRGRQKIERSVYEQFEKMLIDKLNYYVDKQKNSDEAGGLLHALQLTSKFESFKKLGKQSGCLFYIPAWNTSKIDPVTGFVNLFDTRYTNADQARKFFSQFDSIRYNAYKDWFEFAFDYNKFTAKAKDTRTKWTLCTYGTRIRTFRNPARLNQWDNEEVVLTDEFKKAFANADINIHGNLKEAICSLQDKKYLEPLMHLMKLLLQMRNSITNSEVDYLLSPVADENGTFYDSRICSASLPKDADANGAYNIARKGLWAIHQIQETPAGDRPNLAIKNKDWLNFAQQKPYMNE

SEQ ID NO: 1678 - protein, 1286 aa, unidentified
  REGION 1..1286: note = Description of Unknown: uncultivated organism sequence
  REGION 1..1286: note = Category: MG75 effectors
  REGION 1..1286: note = Description: MG75-164 effector
MKQKKTQNPFNQFIGLYPLSKTLRFELRPYNEKTKNNIISAGILAEDNHRAESYKKVKKIIDEYHKAFIERVLKDLVLEEKPLQAFYECYKKSSKEEALQEIGNNLRTQISNAFEKDPKYSTLTSKDLINKELPSIVTTEEERTLLEEFHGFSTYFVGFHQNRENMYSDEEKATSIAYRLINENLPKFIDNIRSFQKIADSPIADKLESIYDEYAKEGYMNVNTLNEMFEISFYNRVLTQTQIDLYNAIIGGKTEKDGHKTQGINEYINLYNQRGEVQKKDRLPLLKPLFKQILSDREHISWFEEGFADDQAMLNAIKDFYLELTETGPTTTESILDRTKSLLRTIADYDLTKIYLGYNSLSKISQQIFGEWDRIQRALEAEYDQREKTKTYEEKEKHFKSLKSVSIGFIDDCLKAFETDKQLSLSIKEYIAQLGKKNDDPDLIDRITASYKAVKAILTTEWPKERNIAQEKDIVALIKDLLDRIKDLQSFIKPLLGSGKESDKDNLFYGELASIWETINTVTPLYDKVRNRMTRKPYSTQKFKVNFRNSQLLKGWDLNKEKDYMGIILRKKDLYFLAIMNKKNTKVFSSKVPSQGECFEKMIYKQFDATKQVPKCSTELKRVKEAIEIDDKPYYELFDKQKFSKPLTITREIWQLNNLVWDKKTNSFVRRKKDETRPKKFQQEYLDITEDREGYCEALRKWIDFVKDFLASYKSTSIYNIKYKDSSEYASIKEFYNFLDQELYHIEFSNVSVDYINELIEEGKIYLFQIYNKDFSPHSKGTPNMHTLYWKTLFDERNLANVAYKLNGEAEIFFRKASLERKVTHPAHDPIKTKNPKTSIKEKAFAYDLIKDKRYTEDKFQLHVPITMNFKSPMEKKGINSRVNNYIKTAEDLHFIGIDRGERNLLYVCVIDSQGNIKDQYSLNEIVNQYNRTDYKYLLEKREEERDKERKSWQTIENIKDLKQGYLSQVVHKIAQLMVQYHAIVVLEDLNSGFKRSRQKVEKSVYQQFEKSLIDKLNYLIDKRLPIDEEGGVLRAYQLTNKFESFKTMKMQNGFLFYIPAWNTSKMDPTTGFVNLFDTRYTNIDKSKEFFDKFEAIRYNEGKDWFELEFDYEHFTTKAEGTQTQWTLCTWGERINTFRNKSKNSSWDYKKINLTEEYKTLFEQFSINYRRNLKKEILEQNSKDFFERLLSLLHLTLQMRNSIPNTDTDYLISPVADANGHFYYSEQCGDNLPKNADANGAYNIARKGMWMAEQIRRSNEGEELKLAISNKEWLRFAQEKPYLEDK

SEQ ID NO: 1679 - protein, 1236 aa, unidentified
  REGION 1..1236: note = Description of Unknown: uncultivated organism sequence
  REGION 1..1236: note = Category: MG75 effectors
  REGION 1..1236: note = Description: MG75-165 effector
MKQLSELTGLYSLSKTLRFELKPIGKTLEHIESKGLIAQDEQRAEEYKKVKDIIDRYHKKFITMCLSDFKFEQNSLETYVALAENTNRDEKAFDEIKKTLRKQIVETFKKGGSYSDLFKKELIQKHLPEFVSDEEEKKMIANFSKFTTYFNGFNENRKNMYSDEDKSTAIAYRLIHENLPMFVNNMKSFSRIADSDVHQHFTEIESSFSEYLGVEHLEEMFQLDYFSETLTQEQIAVYNHIIGGRALEDGTKLKGINEYVNLYNQQHKNSRLPLLKPLYKMILSDRVALPWFPSEEFASDEEMIRAINETYNTLKEVLSIDGDSSLRSLLLNISSYDIKHIYIANDLGLTDISQQMFGQYDVYTSAIKQELREKNAPTAKERRNPELYDERINKLFKSAKSFSIEHLNSLVDSEHTIQNYYKHLGAYDRNGEQRVNLFTQIEMAYVAAKEILSGKHGNISQSDAETAIIKGLLDAFKSLQRFIKPLLGNGEEADKDNEFDAKLREAWNTLDIVTPLYNKVRNWLTRKPYSTEKIKLNFENAQLLGGWDVNKEPDCTSILLRKNGLYYLAIMNKKYNHAFDIDNLPNDGKCYEKIDYKLLPGANKMLPKVFFSKSRIKEFAPSEIIVNAYKKGSHKKGANFSISDCRRLIDFFKASISKHEDWKNFPFSFSSTETYEDISGFYREVEQQGYMLGFRNVSESFIKQLVDEGKLYLFQICNKDFSDFSKGTPNMHTLYWKMLFDEHNLANVVYKLNGQAEVFYRKSSLDVANTTIHKAHQPIMNKNQENKKRQSTFDYDIIKNRRYTVDKFQFHVPISINFKATGRDNVNDNVLDIIRNGGIKHIIGIDRGERHLLYLSLIDLKGNIVKQMTLNDIVNEYNGNTYATNYKNLLAEREGNRTEARKNWKKIENIKDIKKGYLSQVVHIISKMMVEYNAIVVLEDLNMGFMRGRQKIERSVYEQFEKMLIDKLNYYVDKQKNSDEAGGLLHALQLTSKFESFKKLGKQSGCLFYIPAWNTSKIDPVTGFVNLFDTRYTNADQARKFFSQFDSIRYNADKDWFEFAFDYNKFTAKAKGTRTKWTLCTYGTRIRTFRNSERLNQWDNEEVVLTDEFKKAFANADINIHGNLKEAICSLQDKKYLEPLMHLMKLLLQMRNSITNSEVDYLLSPVADENGTFYDSRICSASLPKDADANGAYNIARKGLWAIHQIQETPAGDRPNLAIKNKDWLNFAQQKPYMNE

SEQ ID NO: 1680 - protein, 956 aa, unidentified
  REGION 1..956: note = Description of Unknown: uncultivated organism sequence
  REGION 1..956: note = Category: MG75 effectors
  REGION 1..956: note = Description: MG75-166 effector
MILSDRVALPWFPSEEFASDEEMIRAINETYNTLKEVLSIDGDSSLRSLLLNISSYDIKHIYIANDLGLTDISQQMFGQYDVYTSAIKQELREKNAPTAKERRNPELYDERINKLFKSAKSFSIEHLNSLVDSEHTIQNYYKHLGAYDRNGEQRVNLFTQIEMAYVAAKEILSGKHGNISQSDAETAIIKGLLDAFKSLQRFIKPLLGNGEEADKDNEFDAKLREAWNTLDIVTPLYNKVRNWLTRKPYSTEKIKLNFENAQLLGGWDVNKEPDCTSILLRKNGLYYLAIMNKKYNHAFDIDNLPNDGKCYEKIDYKLLPGANKMLPKVFFSKSRIKEFAPSEIIVNAYKKGSHKKGANFSISDCRRLIDFFKASISKHEDWKNFPFSFSSTETYEDISGFYREVEQQGYMLGFRNVSESFIKQLVDEGKLYLFQIWNKDFSDFSKGTPNMHTLYWKMLFDEHNLANVVYKLNGQAEVFYRKSSLDVANTTIHKAHQPIMNKNQENKKRQSTFDYDIIKNRRYTVDKFQFHVPISINFKATGRDNVNDNVLDIIRNGGIKHIIGIDRGERHLLYLSLIDLKGNIVKQMTLNDIVNEYNGNTYATNYKNLLAEREGNRTEARKNWKKIENIKDIKKGYLSQVVHIISKMMVEYNAIVVLEDLNMGFMRGRQKIERSVYEQFEKMLIDKLNYYVDKQKNSDEAGGLLHALQLTSKFESFKKLGKQSGCLFYIPAWNTSKIDPVTGFVNLFDTRYTNADQARKFFSQFDSIRYNADKDWFEFAFDYNKFTAKAKDTRTKWTLCTYGTRIRTFRNSERLNQWDNEEVVLTDEFKKAFANADINIQGNLKEAICSLQDKKYLEPLMHLMKLLLQMRNSITNSEVDYLLSPVADENGTFYDSRVCSASLPKDADANGAYNIARKGLWAIHQIQETPAGDRPNLAIKNKDWLNFAQQKPYMNE

SEQ ID NO: 1681 - protein, 1236 aa, unidentified
  REGION 1..1236: note = Description of Unknown: uncultivated organism sequence
  REGION 1..1236: note = Category: MG75 effectors
  REGION 1..1236: note = Description: MG75-167 effector
MKQLSELTGLYSLSKTLRFELKPIGKTLEHIESKGLIAQDEQRAEEYKKVKDIIDRYHKKFITMCLSNFKFEQNSLETYVALAEDTNRDEKVFDEIKKTLRKQIVETFKKGGSYSDLFKKELIQKHLPEFVSDEEEKKMIANFSKFTTYFNGFNENRKNMYSDEDKSTAIAYRLIHENLPMFVNNMKSFSRIADSDVHQHFTEIESSFSEYLGVEHLEEMFQLDYFSETLTQEQIAVYNHIIGGRALEDGTKLKGINEYVNLYNQQYKDSRLPLLKPLYKMILSDRVALPWFPSEEFASDEEMIRAINETYNTLKEVLSIDGDSSLRSLLLNISSYDIKHIYIANDLGLTDISQQMFGQYDVYTSAIKQELREKNAPTAKERRNPELYDERINKLLKSAKSFSIEHLNSLVDSEHTIQNYYKHLGAYDRNGEQRVNLFTQIEMAYVAAKEILSGKHGNISQSDAETAIIKGLLDAFKSLQRFIKPLLGNGEEADKDNEFDAKLREAWNTLDIVTPLYNKVRNWLTRKPYSTEKIKLNFENAQLLGGWDVNKEPDCTSILLRKNGLYYLAIMNKKYNHAFDIDNLPNDGKCYEKIDYKLLPGANKMLPKVFFSKSRIKEFAPSEIIVNAYKNGSHKKGANFSISDCRRLIDFFKASISKHEDWKNFPFSFSSTETYEDISGFYREVEQQGYMLGFRNVSESFIKQLVDEGKLYLFQIWNKDFSDFSKGTPNMHTLYWKMLFDEHNLANVVYKLNGQAEVFYRKSSLDVANTTIHKAHQPIMNKNQENKKRQSTFDYDIIKNRRYTVDKFQFHVPISINFKATGRDNVNDNVLDIIRNGGIKHIIGIDRGERHLLYLSLIDLKGNIVKQMTLNDIVNEYNGNTYATNYKNLLAEREGNRTEARKNWKKIENIKDIKKGYLSQVVHIISKMMVEYNAIVVLEDLNMGFMRGRQKIERSVYEQFEKMLIDKLNYYVDKQKNSDEAGGLLHALQLTSKFESFKKLGKQSGCLFYIPAWNTSKIDPVTGFVNLFDTRYTNADQARKFFSQFDSIRYNADKDWFEFAFDYNKFTAKAKDTRTKWTLCTYGTRIRTFRNPAKLNQWDNEEVVLTDEFKKAFANADINIHGNLKEAICSLQDKKYLEPLMHLMKLLLQMRNSVTNSEVDYLLSPVADENGTFYDSRVCSAYLPKDADANGAYNIARKGLWAIHQIQESPAGNRPNLAIKNKDWLNFAQQKPYMNE

SEQ ID NO: 1682 - protein, 1271 aa, unidentified
  REGION 1..1271: note = Description of Unknown: uncultivated organism sequence
  REGION 1..1271: note = Category: MG75 effectors
  REGION 1..1271: note = Description: MG75-168 effector
MNNNLNKFTGLYQLSRTLRFELKPIRKTRDNIERNGFLANDEHRAESYKKVKKLIDRYHKAYIDSVLGRFCLNEDVLANYYDLYMRSSKTEKEAKEFEAIQDYLRKSISAALKKDDRFKRIDKKELIREDMIAYLTDDEEKALVEEFHDFTTYFTGFHENRQNMYSAEAKSTAIAYRLIHDNLPKFIDNIAVFRQIAETSVADNFLKIYMENEEYLNVNSIEEMFDISYYSMVLTQTQIEVYNSIIGGRTLEDGTKLQGINEYINLYNQNLTDKKKRLPKLKPLFKQILSDRAQLSWLQEEFNTGADVIDAVKEYCKDYYDNIEKSIKALLKSLNDYDISKIYVPNDLQLTDISQRMFGNWSIIPNAIEHDIMYNNPRKANETEEKYAERIAKLKKQQKSFSLAYINDCLRELKDADLSTYFASLGAQNTAEKQTTSITSEIDIYYKQLRPLFNVEYPREKNLSQDKLTVMQLKDLLDAFKTLQRFVKPLLGNGDEAEKDEKFYGELMQLWEIINNLTPLYNKVRNYVTRKPFSTEKIKVNFENAQLLDGWDENKEKDNASIILRKDGIYYLGVMKKEQRKLLAKPMPSSGECYEKVVYKFFKDITTMVPKCTTQTKPVKEHFENSTEDYILFDKKSFDAPVVITKEIFDLNNVLYNGVKKFQIEYLRSTNDKKGYEHAVNTWKAFCIQFLKSYKSTSIYNLSSIEEDIEKYKDLNSFYSAVNLLLYSLTFRKVSVDYIDQLVEEDKMYLFQIYNKDFSQYSKGTPNMHTMYWKMLFDEENLKDVVYKLNGQAEVFFRKKSINVSSPTHPANKPIDNKNALNKKKQSTFEYDLIKDRRYSVDKFQFHVPLTLNFKSRGTGNINIDVREYIKESNDIHFIGIDRGERHLLYLCVIDGKGNIVEQYSLNEIVNEYKGNKYSTDYHNLLQERDKKRLEERSSWQTIEGIKELKQGYLSQVVHKISQLVVKYNAIVILEDLNMGFKRGRQKVESSIYQQFEKALIDKLNYLVDKSKAPSEEGGLLRAYQLTSKFDSFQKMGKQSGFLFYIPAWNTSKIDPVTGFVNLFDTRYDNVAKSQAFFNKFDSIRYNEKKDWFEISFDYNNFTAKAEGTKTQWTLCTYGTRIETFRNVDKNSNWDSKEVNLTEKWKSLFDDYSIKYDSNLKDAIIQQSSKEFYVRLLHLLKLTLQMRNSITGTEVDYMISPVADANGKFFDSRKSDSSLPENADANGAYNIARKGLWIAQQIREAEDLKKVKLAITNKEWLQFAQTKPYLG

SEQ ID NO: 1683 - protein, 1236 aa, unidentified
  REGION 1..1236: note = Description of Unknown: uncultivated organism sequence
  REGION 1..1236: note = Category: MG75 effectors
  REGION 1..1236: note = Description: MG75-169 effector
MKQLSELTGLYSLSKTLRFELKPIGKTLEHIESKGLIAQDEQRAEEYKKVKDIIDRYHKKFITMCLSDFKFEQNSLETYVALAEDTNRDEKAFDEIKKTLRKQIVETFKKGGSYSDLFKKELILKHLPEFVSDEEEKKMIANFSKFTTYFNGFNENRKNMYSDEDKSTAIAYRLIHENLPMFVNNMKSFSRIADSDVHQHFTEIESSFSEYLGVEHLEEMFQLDYFSETLTQEQIAVYNHIIGGRALEDGTKLKGINEYVNLYNQQHKDSRLPLLKPLYKMILSDRVALPWFPSEEFASDEEMIRAINETYNTLKEVLSIDGDSSLRSLLLNISSYDIKHIYIANDLGLTDISQQMFGQYDVYTSAIKQELREKNAPTAKERRNPELYDERINKLFKSARSFSIEHLNSLVDSEHTIQNYYKHLGAYDRNGEQRVNLFTQIEMAYVAAKEILSGKHGNINQSDAETAIIKGLLDAFKSMQRFIKPLLGNGEEADKDNEFDAKLREAWNTLDIVTPLYNKVRNWLTRKPYSTEKIKLNFENAQLLGGWDVNKEPDCTSILLRKNGLYYLAIMNKKYNHAFDIDNLPNDGKCYEKIDYKLLPGANKMLPKVFFSKSRIKEFAPSEIIVNAYKKGSHKKGANFSISDCRRLIDFFKASISKHEDWKNFPFSFSSTETYEDISGFYREVEQQGYMLGFRNVSESFIKQLVDEGKLYLFQIWNKDFSDFSKGTPNMHTLYWKMLFDEHNLANVVYKLNGQAEVFYRKSSLDVANTTIHKAHQPIMNKNQENKKRQSTFDYDIIKNRRYTVDKFQFHVPISINFKATGRDNVNDNVLDIIRNGGIKHIIGIDRGERHLLYISLIDLKGNIVKQMTLNDIVNEYNGNTYATNYKNLLAEREGNRTEARKNWKKIENIKDIKKGYLSQVVHIISKMMVEYNAIVVLEDLNMGFMRGRQKIERSVYEQFEKMLIDKLNYYVDKQKNSDEAGGLLHALQLTSKFESFKKLGKQSGCLFYIPAWNTSKIDPVTGFVNLFDTRYTNADQARKFFSQFDSIRYNADKDWFEFAFDYNKFTAKAKDTRTKWTLCTYGTRIRTFRNPARLNQWDNEEVVLTDEFKKAFANADVNIHGNLKEAICSLQDKKYLEPLMHLMKLLLQMRNSITNSEVDYLLSPVADENGTFYDSRVCSASLPKDADANGAYNIARKGLWAIHQIQETPAGDRPNLAIKNKDWLNFAQQKPYMNE

SEQ ID NO: 1684 - protein, 1236 aa, unidentified
  REGION 1..1236: note = Description of Unknown: uncultivated organism sequence
  REGION 1..1236: note = Category: MG75 effectors
  REGION 1..1236: note = Description: MG75-170 effector
MKQLSELTGLYSLSKTLRFELKPIGKTLEHIESKGLIAQDEQRAEEYKKVKDIIDRYHKKFITMCLSDFKFEQNSLETYVALAEDTNRDEKVFDEIKKTLRKQIVETFKKGGSYSDLFKKELIQKHLPEFVSDEEEKKMIANFSKFTTYFNGFNENRKNMYSDEDKSTAIAYRLIHENLPMFVNNMKSFSRIADSDVHQHFTEIESSFSEYLGVEHLEEMFQLDYFSETLTQEQIAVYNHIIGGRALEDGTKLKGINEYVNLYNQQHKDSRLPLLKPLYKMILSDRVALPWFPSEEFASDEEMIRAINETYNTLKEVLSIDGDSSLRSLLLNISSYDIKHIYIANDLGLTDISQQMFGQYDVYTSAIKQELREKNAPTAKERRNPELYDERINKLFKSAKSFSIEHLNSLVDSEHTIQNYYKHLGAYDRNGEQRVNLFTQIEMAYVAAKEILSGKHGNISQSDAETAIIKGLLDAFKSLQRFIKPLLGNGEEADKDNEFDAKLREAWNTLDIVTPLYNKVRNWLTRKPYSTEKIKLNFENAQLLGGWDVNKEPDCTSILLKKNGLYYLAIMNKKYNHAFDIDNLPNDGKCYEKIDYKLLPGANKMLPKVFFSKSRIKEFAPSEIIVNAYKKGSHKKGANFSISDCRRLIDFFKASISKHEDWKNFPFSFSSTETYEDISGFYREVEQQGYMLGFRNVSESFIKQLVDEGKLYLFQIWNKDFSDFSKGTPNMHTLYWKMLFDEHNLANVVYKLNGQAEVFYRKSSLDAANTTIHKAHQPIMNKNQENKKRQSTFDYDIIKNRRYTVDKFQFHVPISINFKATGRDNVNDNVLDIIRNGGIKHIIGIDRGERHLLYLSLIDLKGNIVKQMTLNDIVNEYNGNTYATNYKDLLAEREGNRTEARKNWKKIENIKDIKKGYLSQVVHIISKMMVEYNAIVVLEDLNMGFMRGRQKIERSVYEQFEKMLIDKLNYYVDKQKDSDEAGGLLHALQLTSKFESFKKLGKQSGCLFYIPAWNTSKIDPVTGFVNLFDTRYTNADQARKFFSQFDSIRYNADKDWFEFAFDYNKFTAKAKDTRTKWTLCTYGTRIRTFRNSERLNQWDNEEVVLTDEFKKAFANADINIHGNLKEAICSLQDKKYLEPLMHLMKLLLQMRNSITNSEVDYLLSPVADENGTFYDSRVCSASLPKDADANGAYNIARKGLWAIHQIQESPAGDRLNLAIKNKDWLNFAQQKPYMNE

SEQ ID NO: 1685 - protein, 1235 aa, unidentified
  REGION 1..1235: note = Description of Unknown: uncultivated organism sequence
  REGION 1..1235: note = Category: MG75 effectors
  REGION 1..1235: note = Description: MG75-171 effector
MKQLNELTGLYSLSKTLRFELKPIGKTLEHIESKGLIAQDEQRAEEYKKVKDIIDRYHKAFITMCLRDFNFDQNSLETYVALAEDSNRDEKDFDEIKKALRKQIVEAFKKGGSYSDLFKKELIQKHLPEFVKDEEEKKMVENFSKFTTYFSGFNENRKNMYSDEDKSTAIAYRLIHENLPMFIDNMKSFGKIAVSDVSQHFSEIESSFSEYLNVEHLADMFQLDYFSETLTQEQIAVYNHIVGGRTLEDGTKLQGVNEYVNLYNQQHKDNRLPLLKPLYKMILSDRVALSWLPEEFASDEEMINAINETYNTLKDVLMGNGDNSLRNLLLNIDKYDVEHIYIGNDLGLTDISQQLFGQYDVYTSAIKQELRNSVSPTAKERREPELYAERINKLFKSAKSFSILYLNSLVDSEHTIQSYYKQLGAYDRGGEQRINLFSQIEMAYVAAKDILSGKHGNISQSDADTAIIKNLLDAYKSLQRFIKPLLGDGEEADKDNEFDAKLREAWDALDIVTPLYNKVRNWLTRKPYSTEKIKLNFENAQLLGGWDVNKEPDCTSVLLRKNGFYYLAIMNKKYNHAFDIDNLPHNGKCYEKIDYKLLPGANKMLPKVFFSNSRIKEFAPSDAIVSAYRKGTHKKGSNFNISDCRRLIDFFKASIMKHEDWKKFPFSFSPTETYEDISGFYREVEQQGYMLGFRNVSESFINQLIDEGKLYLFQIWNKDFSEFSKGTPNMHTLYWKMLFDERNLANVVYKLNGQAEVFYRKRSLDVANTTIHKAHQPIVNKNQENKKLQSTFEYDIIKNRRYTVDKFQFHVPISINFKAIGRDNVNDNVLDIIRNGGIKHIIGVDRGERHLLYLSLIDLNGNIVKQMTLNDIVNEYNGNTYATNYRDLLAEREGNRTEARKNWKEIENIKDIKQGYLSQVVHIISKMMVEYDAIVVLEDLNMGFMRGRQKIERSVYEQFEKMLIDKLNYYVDKQKSVNEAGGLLHALQMTSKFESFKKLGKQSGCLFYIPAWNTSKIDPVTGFVNLFDTRYTNADQARRFFSQFDVIRYNADKDWFEFAFDYNNFTAKAEGTRTKWILCTYGTRIRTFRNPAKLNQWDNEEVVLTDEFKKAFANADIDIHGNLKEAICSLQDKKYLEPLMHLMKLLLQMRNSITNSEVDYLLSPVADENGKFYDSRTCSDSLPKDADANGAYNIARKGLWAIRQIQETPAGERSNLAIKNKEWLNFAQQKPYENE

SEQ ID NO: 1686 - protein, 967 aa, unidentified
  REGION 1..967: note = Description of Unknown: uncultivated organism sequence
  REGION 1..967: note = Category: MG75 effectors
  REGION 1..967: note = Description: MG75-172 effector
MSDRESVSWLPPKFDSDKDLLIKIKECYYALSEREKVFDKLESILKSLSTYDLSKIYISNDSQLSYISQKMFGRWDIISKAIREDCAKRNPQKSRESLEKFAERIDKKLKTIDSISIGDVDECLAQLGETYVKRVEDYFVAMGELEIDDEQTDTTSFKKNIEGAYESVKELLNNADNITDNNLMQNKGNVEKIKTLLDAIKDLQRFIKPLLGKGDEADKDGVFYGEFTSLWTKLDTVTPLYNMVRNYLTSKPYSTKKIKLNFENSSLMKGWDLNKEPDNTTVIFRKDGLYYLGIMGKKYNRVFVDREDLPHDGECYDKMEYKLLPGANKMLPKVFFSETGIQRFRPSEELLGKYERGTHTKGAGFDLGYCRALIDFFKKSIERHDDWKKFDFKFSDTSTYQDISEFYREVEQQGYKMSFRKVSVDYIKSLVEEGKLYLFQIYNKDFSAHSKGTPNMHTLYWKMLFDEENLKDVVYKLNGEAEVFFRKSSITVQSPTHPANSPIKNKNKDNQKKESKFEYDLIKDRRYTVDKFLFHVPITMNFKSVGVSNINQLVKRHIRSATDLHIIGIDRGERHLLYLTVIDSRGNIKEQFSLNEIVNEYNGNTYRTDYHELLDTREGERTEARRNWQTIQNIRELKEGYLSQVIHKISELAIKYNAVIVLEDLNFGFMRSRQKVEKQVYQKFEKMLIDKLNYLVDKKKPVAETGGLLRAYQLTGEFESFKTLGKQSGILFYVPAWNTSKIDPVTGFVNLFDTHYENIEKAKGFFDKFKSIRYNSDKDWFEFVVDDYTRFSPKAEGTRRDWTICTQGKRIQIYRNPQRNNEWEGREIDLTKAFKEHFEAYGVDISKDLREQINTQNKKEFFEELLRLLRLTLQMRNSMPSSDIDYLISPVADDTGCFFDSRKQAELKENAVLPMNADANGAYNIARKGLLAIRKMKQEENDSAKISLAISNKEWLKFAQTKPYLED

SEQ ID NO: 1687 - protein, 1236 aa, unidentified
  REGION 1..1236: note = Description of Unknown: uncultivated organism sequence
  REGION 1..1236: note = Category: MG75 effectors
  REGION 1..1236: note = Description: MG75-173 effector
MKQLSELTGLYSLSKTLRFELKPIGKTLEHIESKGLIAQDEQRAEEYKKVKDIIDRYHKKFITMCLSDFKFEQNSLETYVALAEDTNRDEKSFDEIKKTLRKQIVETFKKGGSYSDLFKKELIQKHLPEIVTDEEEKKMIANFSKFTTYFNGFNENRKNMYSDEDKSTAIAYRLIHENLPMFVDNMKSFSRIADSDVHQHFTEIESSFSEYLGVEHLEGMFQLDYFSETLTQEQIAVYNHIIGGRVLEDGTKLKGINEYVNLYNQQHKDSRLPLLKPLYKMILSDRVALPWFPSEEFASDEEMIGAINETYNTLKDVLSIDGDSSLRCLLLNISSYDIKHIYIANDLGLTDISQQMFGQYDVYTSAIKQELRTTNAPTAKERRTPELYDERINKLFKSAKSFSIEYLNSLVDSEHTIQNYYKHLGAYDRNGEQRVNLFTQIEMAYVAAKEILSGKHGNISQSDAETAIIKGLLDAFKSLQRFIKPLLGNGEEADKDNEFDAKLREAWNTLDIVTPLYNKVRNWLTRKPYSTEKIKLNFENAQLLGGWDVNKEPDCTSILLRKNGLYYLAIMNKKYNHAFDIDNLPNDGECYEKIDYKLLPGANKMLPKVFFSKSRIKEFAPSEIIVNAYKKGSHKKGANFSISDCRRLIDFFKASISKHEDWKNFPFSFSSTETYEDISGFYREVEQQGYMLGFRNVSESFIKQLVDEGKLYLFQIWNKDFSDFSKGTPNMHTLYWKMLFDEHNLANVVYKLNGQAEVFYRKRSLDVANTTIHKAHQPIMNKNQENKKRQSTFDYDIIKNRRYTVDKFQFHVPISINFKATGRDNVNDNVLDIIRNGGIKHIIGIDRGERHLLYLSLIDLKGNIVKQMTLNDIVNEYNGNTYATNYKNLLAEREGNRTEARKNWKKIENIKDIKKGYLSQVVHIISKMMVEYNAIVVLEDLNMGFMRGRQKIERSVYEQFEKMLIDKLNYYVDKQKNSDEAGGLLHALQLTSKFESFKKLGKQSGCLFYIPAWNTSKIDPVTGFVNLFDTRYTNADQARKFFFQFDSIRYNADKDWFEFAFDYNKFTAKAKDTRTKWTLCTYGTRIRTFRNPARLNQWDNEEVVLTDEFKKAFANADINIHGNLKEAICSLQDKKYLEPLMHLMKLLLQMRNSITNSEVDYLLSPVADENGTFYDSRVCSASLPKDADANGAYNIARKGLWAIHQIQESPAGDRPNLAIKNKDWLNFAQQKPYMNE

SEQ ID NO: 1688 - protein, 1237 aa, unidentified
  REGION 1..1237: note = Description of Unknown: uncultivated organism sequence
  REGION 1..1237: note = Category: MG75 effectors
  REGION 1..1237: note = Description: MG75-174 effector
MHTMKKINELTALYPLSKTLRFELKPIGKTLDHIEQKGLIVQDEQRAEEYKQVKNIIDSYHKEFITMCLKGLKLNMIYLERYESLARDVHRDEAEFDKVKAALRKQIVEAFKQGGSYNDLFKKELIQKHLPEFVESEEEKKMVANFSKFTTYFTGFYENRKNMYSDEEKSTAIAYRLIHENLPLFLDNMRSFRKIAESEVGEHFANIEVCFEEYLNVEHLAEMFELDYFSDTLTQEQIAVYNSVIGGRTLDDGTKIQGINEYVNLYNQQHKEARLPLLKPLYKMILSDRVALSWLPENPFESDEEMVEAIKEMCQSLKEVLMGNDGLRNLLLNIDLYDIEHIYIANDLGLTDISQQMFGQYDVYASAIKQELRQGVKQSPKERREPELFEERINRLYKSAKSFSIAYLNSHTDANHTIESYFKQLGAYDREGEQRINLFTQIEMAQIEATDIFAGKHGNISQSDKEIAILKGLLDAYKSLQHFVKPLLGHGDEADKDNEFDAKLREAWNALDIVTPLYNKVRNWLTRKPYSVEKIKLNFENAQLLGGWDVNKEPDCTSVLLRKDGFYYLAIMDKKSNHAFDSDELPCDGKCYEKIDYKLLPGANKMLPKVFFSKSRIDEFAPSKEIVEAYKNGTHKKGKDFNLAHCRRLIDFFKRSITKHEDWKNFPFVFSPTESYEDISGFYREVEQQGYMLSFRKVSESFINQLVDEGKLYLFKIWNKDFSEYSKGMPNMHTLYWKMLFNEQNLADTVYKLNGQAEVFYRKRSLDVADTTVHRASQPLVNKNALNKKRHSTFDYDIVKDRRYTVDKFQFHVPMTMNFKAVGRDNINSEVLNIIRNDGIKHIIGIDRGERHLLYLSLIDLKGNIVKQMTLNDIVNEYNGNTYATNYRDLLAEREGNRTEARRNWKKIENIKEIKQGYLSQVVHIISKMMVEYDAIVVLEDLNMGFMRGRQKIERSVYEQFEKMLIDKLNYYVDKQKRIDEAGGLLHALQLTSKFESFKKLGKQSGCLFYIPAWNTSKIDPVTGFVNLFDTRYVNADKAREFFSKFDSIRYNDAKNWFEFAFDYNKFTEKAKGTRTRWTLCTWGTRIRTFRNPAKLNQWDNEEVVLTDVFKKAFDEAGIDIHSNLKEAICTLTEKKHLESLMHLMKLLLQMRNSITNSEIDYLLSPVADENGHFYDSRTCDDTLPKDADANGAYNIARKGLWAIRTIQENSETERPNLALKNQDWLRFAQQKPYLND

SEQ ID NO: 1689 - protein, 1142 aa, unidentified
  REGION 1..1142: note = Description of Unknown: uncultivated organism sequence
  REGION 1..1142: note = Category: MG75 effectors
  REGION 1..1142: note = Description: MG75-175 effector
MKKFLDNDDDKALLDEFYEFTTYFTGFHENRKNMYSDEAKSTAIAYRLIHDNLPKFIDNMAVFRKIASTSVAEKFSTIYKAFEEYLNVNSIDEMFSLDYYNIVLTQSQIEVYNSIIGGRTLEDGTKIQGINEYINLYNQQKTNKKERLPKLKPLFKQILSDRVQLSWLQEEFNTGTDVLNAVKEYCTSYFDNVEEAVKVLLTGIGDYDLSKIYITNDLAITDVSQRMFGEWCIIPNAIEQRLRNDNPQKAKETEEKYSDRISKLKKLPKSFSLGYINECISELKGVDIADYYAALGAINTESKQEPSIPTKIQVHYNALKQILDTDYPREKNLSQDKLTVMQLKDLLDDFKALQRFIKPLLGNGDEADKDEKFYGELMQLWEVIDSITPLYNKVRNYSTRKPFSTEKIKVNFENAQLLDGWDENKESTNASIILRKDGMYYLGIMKKEHRNILNQPMPSDGDCYDKVVYKFFKDITTMVPKCTTQMKSVKEHFTNSNDDYTLFDKDKFLAPVVITKEIFDLNNVLYDGVKKFQVGYLNNTGDSQGYNHAVAIWKSFCLQFLKTYKSTSIYNFSSIEKNFDRYTDLNSFYGAVNLLLYSLTYRKVSVDYIQQLVDDDKMYLFRIYNKDFSPYSKGTPNMHTLYWKMLFDDCNLSDVVYKLNGQAEVFFRKKSINYQRPTHPANKPIDNKNVNNPKKQSTFDYDLIKDRRYTLDKFMFHVPITLNFKGMGSGDINMQVREYIKATDDLHFIGIDRGERHLLYICVINCKGDIVEQYSLNEIVNNYKGIDYSTDYHALLSDRDKKRKEERSSWQTIEGIKELKAGYLSQVIHKITQLMVKYNAIVLLEDLNMGFKRGRQKVESSVYQQFEKALIEKLNYLVDKNKDVNEIGGLLHAYQLTNDTKLQNKNGKQDGFLFYVPAWNTSKIDPVTGFVNLLDTRYENVATAQAFFNKFDSIRYNKEFDRFEFKFDYANFTAKAEDTRTQWTLCTCGTRVETFRNAEKNSNWDSREIDLTSEWKSLFAKHNISLDTNLKEAILLQSNKTFYTDILHLMKLTLQMRNSVTGTDIDYMVSPVSNECGEFFDSRYAKDGLPVNADANGAYNIARKGLWLAQQIKNASNLSEVKLAITNKEWLRFAQSKPYLND

SEQ ID NO: 1690 - protein, 1227 aa, unidentified
  REGION 1..1227: note = Description of Unknown: uncultivated organism sequence
  REGION 1..1227: note = Category: MG75 effectors
  REGION 1..1227: note = Description: MG75-176 effector
MKNLYSDLHNLYGLSKTLRFELQPVGRTKENFENYILDSDEEKSEKFKKVKAYCDEVHKNFIKNCLEKIDLADIKPLLKRYYELFLINNRSEQEDKEFEKIQENLCKKISGNFKNNDLYKGLFEKDMIKKYLPEYFKNDKEKLKEISLFFDFTTYFTGYHKNRQNMYSEENKSTAISFRLIKQNLPTFIKNMQNFKKIQNVIPTIGKTLTSKLGINIEYLFSNVEVYAECLTQKAIDMYNCAIGGKTLDNGEKIQGINEFINLYNQQNPNKKLPKLKFLYKQILSDNTSVSFKIDKIEDDKELIDLINSYYEKLKPVIESIDKVSGETELVLAIKNLSNYDLSRIWINQDDLTNVSQQVYGDWSYITHLLEEEYNSQNPKGAKQSIEKYNEKRSKDLKKIKEYSFAHLNSLVAQNDDCAKNKLYTYFVENLLKIITDIKSSQLQCNEILTRNHEENNKTLLGDFSSISLIKDFLENMKKLQNLVKTFMPKTIGIETDDLFYNALNYEILSEIIPVYNKVRNYVTQKSYSVEKFPLTFHCPTLLDGWDLNKEESNLSILFEKDGFYYLGIMNKKDNKIFKNIQPTKENEEVYRKIEYKLLPGPNKMLPKVFFSESRITEFNPTNELLSKYKKGCHKKGIDFDINFCRDLIDFYKKSLSIHQDWSQFNFKFDDTNKYQDISKFYRQVEEQGYRISTTNISEKYIDSLVEDGKLFLFKIYNKDFSEYSKGTPNLHTLYWKALFDEDNLKNVVYKLNGGAEIFYRKKSIEYKITHPKNQLIKNKNELNDKKESIFDYDLIKNKRFTMDKFLFHVPITLNFKSKNLEYINELVNLKIKENNNINVIGIDRGERNLIYLTVVNSKGELLEQLSLNEIVNEYNDKTYRTNYHDLLNKKEQERNEARKSWGAIKNIKELKEGYMSQVIHKITDLMIKYNAIIVLEDLNSGFKNSRKKVEKQVYDKFETMVINKLSYFVDKKQGKFDEGGLLNAYQLVNKDSKGKQSGVLFYIPAWNTSKIDPVTGFVNLFCIKNMSIEKAKEFFNKFENIKYNKEENFFEFDFDYSKFSDKACGIRKDWTICTYGERIKTFRNPSKNNQWDNEEIKLTEKFKELFEKYSINLLNIKNGIQNQTEKKFFDSLIGLFKLTLQMRNSVTNTDIDYILSPIKDKNGNFYDSRKNIKTLPKDADANGAYNIARKGLMLIEQIKETENLSKLKLKSITNEQWLTYVQEKNR

SEQ ID NO: 1691 - protein, 1245 aa, unidentified
  REGION 1..1245: note = Description of Unknown: uncultivated organism sequence
  REGION 1..1245: note = Category: MG75 effectors
  REGION 1..1245: note = Description: MG75-177 effector
MAENRKIDNLQNLYPNTKTIVNKLIPQGATLRNFENNHLLENDTERKDNYQIVKKLIDEYHKFFIEQSLSNVTYIDGLDEYIDVYFNSSDDKNELDSLEDKLRKNIANLFTKSSKYSDMFKKEMITKLLPEFLEATNNLEYLDIVNSFAEFTTYFKGFFDNRKNMYTSEAQSTGIAYRCINDNLPKFLDNVKSFNRAKDKLSEKNLTDLNNDFEGLCGTTTENVFSADYYVFVLAQSGIDRYNEIIGGYTTSDGTKIKGVNEYINLYNQRCQNKSDRIPNMKPLFKQILSDRQTVSFIPDSFSDDNEVLKAVYSAYNDNDTELEYKSIKETVDKIKNLFIDFEEPQLNGIYIKNGLPVTDLSNGIFKNWSMIRNLWNDDYDSKHKPAKVKDIEKYEDKRSSQYRSNKSLSLGFLQELVNKSENDEIGSKSISEYYREKTLELTENIQRTYFKAESLLESKYDIKKKNLKSDEESIALIKDFLDSIKELEKLLKPLCGTGKEQDKNEVFYGEFIPLFNYLCNIDSLYNKVRNYVTQKPYSTEKIKLNFENPQFLKGWDRNKEKDYRSVLLIKDQEYYLGVMNKGDSKIFENLSFDGEKECYTKVVCKLLPGPNKMLPKVFFAKSNIDFFAPSDEIQTLYKAGTFTKGKSFNIDDCHKLIDFYKQSLYKHPDWSTFNFEFRETSLYNDISEFYNDIHNQGYKISFDSVPESYINELVNKGKLYLFKIYNKDFSKYSKGTPNLHTLYFKMLFDERNLKDVVYKLNGRAEMFYRPASIMENDIISHPANQPIKNKNPHSEKTHSTFEYDLIKDKRYTKAQFSLHIPITLNFKASGAGSINDKVNELLKNCDDNYVIGIDRGERHLLYLTVINGRGEVVEQYSLNTIINEYNNKTHKVDYHNLLSEKETKRKEARQNWTAIENIKELKEGYISQVVHKICELVVKYDAVICMEDLNAGFKQGRTKFEKQVYQKFEKMLIDKLNYFVDKKKAPEENGGLLKAYQLTNKFDSFKKMGRQNGIVFYVPAWLTSKIDPSTGFVDLLKPKYKSVEDSKNFFSRFDSIRYNSDEDWFEFEFDYDNFPRGSASFRKRWTVCTFGKRIRTYRNPEKNSEWDNEEIDITASFKELFNNYSIDYIRNNLKTEIQNQTQKDFFQKLIKLFALTVQMRNSITNTDIDYLISPVMDKNGNFYDSRNYDNDSKLPANADANGAYNIARKGLWAIEQIKNTDDGKRPKLAISNKEWLKLAQSADM

SEQ ID NO: 1692 - protein, 1274 aa, unidentified
  REGION 1..1274: note = Description of Unknown: uncultivated organism sequence
  REGION 1..1274: note = Category: MG75 effectors
  REGION 1..1274: note = Description: MG75-178 effector
MNNNLNKFTGLYQLSKTLRFELKPIGKTLDNIQNNGFIANDEHRAESYKLVKKLIDNYHKDYIESVLDNFELNKEVLYSLYELYTCTNKTEKETKQYEAAQDSLRKAISSALKKDERFKHIDKKELIREDMLNYLDNEQDKALVNEFHDFTTYFTGFNENRQNMYAAEAKSTAIAYRLIHENLPKFIDNIAIFKKIAETSVADNFPALYQHYEEYLNVNDIGEIFELDYYNIVLTQKQIEVYNNIIGGRTLSDDTKIKGINEYVNEYNQKQKDKKDRLPKLKPLFKQILSDRVQLSWLQEEFQTGADVLNAIKNYCDTYFADIHESIKALLTSLKEYDLSKIYIPNDLQLTDISQQMFGNWSIIPNAIEQDIKNNNPRKAKEDEEKYSQRIDKIKKQAKSYSLAYINACIKELNNADVATHFASLGAIDNNEKQKASITADIVVHYNQLKPLFGVEYPKEKNLSQDKLTVMQIKDLLDDFKSLQRFVKPLLGNGDEAEKDEKFYGELMQLWEVINNITHLYNKVRNYSTRKPYSTDKIKINFENAQLLDGWDENKEKTNASIILRKNGLYYLGIMKKEHRKLLDKPMPSSGECYEKVVYKFFKDITTMVPKCTTQTKAVATHFKDSGEDYILFDKKNFNEPIVITKEIYELNNVLYDGVKKFQIEYLRTTNDKKGYEHAVNIWKNFCMQFLKAYKSTSIYDLSSIEKNIGNYGDLNSFYSAVNLLLYSLTFRSVSVDYINMLVDEDKMYLFQIYNKDFSTFSKGTPNMHTLYWKMLFDPQNLANVVYKLNGQAEVFFRKKSITIAKPTHPANKPIDNKNPANGKKQSIFDYDLIKDRRYTVDKFQFHVPITINFKSNGSDNINMMVKEHIKTSDDMHYIGIDRGERHLLYLCVIDNKGNIVEQYSLNNIKNEHNGNNYDTDYRNLLQERDKKRQEERSSWQTIEGIKELKQGYLSQVIHKITQLMVKYNAIVVLEDLNMGFKRGRQKVESSVYQQFEKALIDKLNYLVDKKKAPTEPGGLLHAYQLTSKFDSFQKMGKQSGFLFYIPAWNTSKIDPVTGFANLFDSRDTRYENIAKAQAFFNKFDSIRYNEKKDWFELSFDYNNFTSKAEGTKSKWTICTQGTRIETFRNTEKNSNWDSKEIQLTDEWKKLFTEYSIPFKSNLKDAIAQQSNKDFYTKLLSLLKLTLQMRNSITGTDVDYMISPVANVKGEFFDSRNSNATLPENADANGAYNIARKGLWIAKQIKEAEDLSKVKLAMSNKDWLQFAQTKPYLV

SEQ ID NO: 1693 - protein, 1286 aa, unidentified
  REGION 1..1286: note = Description of Unknown: uncultivated organism sequence
  REGION 1..1286: note = Category: MG75 effectors
  REGION 1..1286: note = Description: MG75-179 effector
MNKSILSRFTNLYQVSKTLRFELQPVGKTKENIEENGILLRDEKRAADCKIVKEIIDEYHKQYIENRLKDFKLPLNSEGKHDSLEEYQALYEMSKRSEADEATFKEVKDNLRSIIAERLTNAPTYKCIFGKELIRKELVDFLEDENAKEIVSQFADFTTYFGGFHKNRENMYSGEEKSTAIAYRLIHQNLPRFMDNMKAFERIAATSVAEHFVDIFEGWEEYLNVGSIEEIFRLDYFSDALTQQHIEVYNYIIGKKVLEDGSEIKGINEYVNLYNQQQKDKKLRLPLLVPLYKQILSDREKLSWIAEEFDSDDKMLAAITETYSHLHDLLMGEENESLRSLLVHLKDFDLSRINITNDLSLTDISQHLFGRYDVFTSGIKDELRAITPRKRNETDEQLGDRISKIFKTQQSFSIAFLNTLSQPALEGGNPRKIEDYFMALGAVNTETTQKENLFAQIEYAYEDVRAVLQMKETDNMLSQNKQAVAKIKAFLDALKGLQHFVKPLLGSGEEEEKDELFYGSFQMMWDELDAITPLYNKVRNWLTRKPFSTEKIKLNFDNAQLLEGWDENKETTNASIILRKDGFYYLGIIRKDCRKLLGAPMPSDGECYDKVVYKFFKDITTMVPKCTTQKKDVVAHFAHSKEDYILFDKKTFNAPVTITKEVYDLNNVLYNGIKKFQIEYLRSTGDKVGYEHAVSTWKSFCMSFLKAYKSTSIYNLALVEQHINSYNDLSSFYNAVNLLLYSLTYRKVSVNFIHSLVDEGKLYLFRIWNKDFSEFSKGTPNLHTLYWKMLFDERNLADVVYKLNGQAEVFYRKSSIKPENRIIHLANKPIANKNELNRKHESTFKYDIIKDRRYTFDKFQFHVPITINFKANGREDINPAVQDCIRRGGFTHVIGIDRGERHLLYLSLIDMQGNIVKQMTLNEIINEYKGNTYKSNYHDLLAKREGERTEARRSWDTIENIKEMKEGYLSQVVHIISKMMVEYNAIVVLEDLNTGFMRSRQKIERQVYEKFEKMLIDKLNCYIDKRADMSDIAGLLHPLQLTCEAKKWKRSHQCGCLFYIPAWNTSKIDPVTGFVNLFDTRYDNMAKAKAFFGKFKSIRYNVSKDWFEFAFDYNNFTTMAEGTRTDWTVCTYGERILTFRNPDKNLQWDDKEVVLTGAFKQLFEKHDIDILDNLKEAICMQTDAQFFKDLLGLMKLLLQMRNSKTGSEVDYLLSPVADEQGNFFDSRKGNATLPDNADANGAYNIARKGLWAIHKIQETAENKKPSLAISNKEWLQFAQTKPYLAD

SEQ ID NO: 1694 - protein, 1236 aa, unidentified
  REGION 1..1236: note = Description of Unknown: uncultivated organism sequence
  REGION 1..1236: note = Category: MG75 effectors
  REGION 1..1236: note = Description: MG75-180 effector
MKQLSELTGLYSLSKTLRFELKPIGKTLEHIESKGLIAQDEQRAEEYKKVKDIIDRYHKKFITMCLSDFKFEQNSLETYVALAEDTNRDEKSFDEIKKTLRKQIVETFKKGGSYSDLFKKELIQKHLPEIVTDEEEKKMIANFSKFTTYFNGFNENRKNMYSDEDKSTAIAYRLIHENLPMFVDNMKSFSRIADSDVHQHFTEIESSFSEYLGVEHLEGMFQLDYFSETLTQEQIAVYNHIIGGRVLEDGTKLKGINEYVNLYNQQHKDSRLPLLKPLYKMILSDRVALPWFPSEEFASDEEMIGAINETYNTLKEVLSIDGDSSLRCLLLNISSYDIKHIYIANDLGLTDISQQMFGQYDVYTSAIKQELRTTNAPTAKERRTPELYDERINKLFKSAKSFSIEYLNSLVDSEHTIQNYYKHLGAYDRNGEQRVNLFTQIEMAYVAAKEILSGKHGNISQSDAETAIIKGLLDAFKSLQRFIKPLLGNGEEADKDNEFDAKLREAWNTLDIVTPLYNKVRNWLTRKPYSTEKIKLNFENAQLLGGWDVNKEPDCTSILLRKNGLYYLAIMNKKYNHAFDIDNLPNDGKCYEKIDYKLLPGANKMLPKVFFSKSRIKEFAPSEIIVNAYKKGSHKKGANFSISDCRRLIDFFKASISKHEDWKNFPFSFSSTETYEDISGFYREVEQQGYMLGFRNVSESFIKQLVDEGKLYLFQIWNKDFSDFSKGTPNMHTLYWKMLFDEHNLANVVYKLNGQAEVFYRKRSLDVANTTIHKAHQPIMNKNQENKKRQSTFDYDIIKNRRYTVDKFQFHVPISINFKATGRDNVNDNVLDIIRNGGIKHIIGIDRGERHLLYLSLIDLKGNIVKQMTLNDIVNEYNGNTYATNYKNLLAEREGNRTEARKNWKKIENIKDIKKGYLSQVVHIISKMMVEYNAIVVLEDLNMGFMRGRQKIERSVYEQFEKMLIDKLNYYVDKQKNSDEAGGLLHALQLTSKFESFKKLGKQSGCLFYIPAWNTSKIDPVTGFVNLFDTRYTNADQARKFFSQFDSIRYNADKDWFEFAFDYNKITAKAKDTRTKWTLCTYGTRIRTFRNPARLNQWDNEEVVLTDEFKKAFANADINIHGNLKEAICSLQDKKYLEPLMHLMKLLLQMRNSITNSEVDYLLSPVADENGTFYDSRVCSVSLPKDADANGAYNIARKGLWAIHQIQESPAGDRPNLAIKNKDWLNFAQQKPYMNE

SEQ ID NO: 1695 - protein, 1283 aa, unidentified
  REGION 1..1283: note = Description of Unknown: uncultivated organism sequence
  REGION 1..1283: note = Category: MG75 effectors
  REGION 1..1283: note = Description: MG75-181 effector
MKQFTNLYQVTKTPRFELQPIGRTKEHIERNGILQRDEQRAEDYKKVKQLIDDYHKQFIKDRLWNFQLPLANEGQRNSLEEYQELYELSKRDDAQEKIFTEIKDNLRSIIAKRLTERGSAYDRIFKKELIREDLIDFLEKEEDKDVVRQFADFTTYFTGFNENRMNMYSDEEKSTAIAYRLIHQNLPKFMDNMKSFAKILQTPVAEHFMDIYKGWEEYLNVENLEDVFKLSYFSETLTQPHIEVYNYIIGKKVLEDGTEIKGINEYVNLYNQQLKDKEQRLPLLVPLYKQILSDREKLSWMAEEFDSDEKMLAAINESYDHLHDLLVGDENESLRSLLIHLKDFDLTQINISNDLSITDISQHLFGQYDVFTKGIKEELKLITRRKKGETEEELDERVSKIFKTQKSFSIDLLNHLPQPVMDDGRPRKVEDYFMSLGAIDTETTQKENLFAQIENAYEAVRPILQLTGTSETLSQNKSAVAKIKTLLDAFKDLQHFIKPLLGSGEENEKDELFYGAFQMIWDELDTITPLYNKVRNWLTRKPYSIEKIKLNFDNAQLLDGWDENKETANAAIILRKDAMFYLGIMNKEDRKLLANPMPTDGDCYDKVVYKFFKDITTMVPKCTTQMKAVSEHFKQSSVDYILFDKKKYHEPVIITKEIYELNNVLYKGAKKFQIEYLRTTRDTAGYEHAVATWKKFCIQFLKAYISTSIYDLSSVEQNIDNYHDLNSFYGAVNLLLYNLSYKKVSVNYINKLVDEGKLFLFRIWNKDFSEYSKGTPNLHTLYWRMLFDKRNLADVVYKLNGQAEVFYRKSSIKDENRIVHPAHKAIDNKNALNKKQTSTFEYDIIKDRRYTVDKFQFHVPITINFKAMGRTNINPIVQETIRRGGFTHVIGIDRGERHLLYLSLIDLHGNIVKQMTLNEIINEYNGQEHKTNYHSLLVRREGERTAARRSWDTIESIKELKEGYLSQVIHIISKLMVEYNAIVVLEDLNMGFMRGRQKIERQVYEKFEKMLIDKLNCYIDKQADPQSIGGLLHPIQLANKFESFRKLGKQCGCLFYIPAWNTSKIDPVTGFVNLFDTRYETREKARLFFSRFQRIKFNKDKDWFEFTFDYNDFTTKAEGTCTLWTLCSYGTRIRNFRNPLLNNQWDDEEIVLTDEFKQLFDKYGLDLQGNLKESINAQTDAQFFKELMGLMKLLLQMRNSKTNSEVDYLLSPVADGNNHFFDSRDGKLNLPDNADANGAYNIARKGLWVIRRIQETPEGEKLSLAISNKEWLQFAQTKPYLRD

SEQ ID NO: 1696 - protein, 1239 aa, unidentified
  REGION 1..1239: note = Description of Unknown: uncultivated organism sequence
  REGION 1..1239: note = Category: MG75 effectors
  REGION 1..1239: note = Description: MG75-182 effector
MEEFNQFTGLYPLSKTLRFELKPVGKTLENIVKHGLLEEDKHRADSYEKVKKIIDEYHKVFIDNALTDFKLKNGESKKNETLDQYFALYNKREKDENDKKDFSEIQKSLRKQIVDSLTGNEKYKNIFKKELIKQDLLEFCNEDDRKYVEEFKDFTTYFNGFNENRANMYSAEEQSTAIAYRLIHDNLPKFVDNINTFSKVLAVPEINEKLPKLYKDFESYLNVESISEMFQLDYFNMVLTQKQIDVYNAIIGGKDDGNEKIQGLNEFINLYNQKHKDTRLPKLKVLYKQILSDRNAISWLPEEFKDDNEVLIAINSCYKDLYEHVLGEKNLKILLENISQYQLDGIFIKNDLQLPNISQKLLGNWSVIQNAIIEDSKSFIKKKGKESENEYESRLNEIYKKQNSFSVAYINECLKNAGKEIGVENYFSALGAVNTETEQRENLFARISNAYSIVSDLLNAQYPEGRNLSQDKQNVAKIKDLLDALKALQHFIKPLLGNGDESGKDEKFYGEFTALWDELNKITSLYNMVRNYMTRKPYSEEKIKLNFQNSTLMDGWDYNKERDNTAVILRKDGLYYLGIMNKKYNKIFEPENVKHDGECFEKMIYKLLPGANKMLPKVFFSKSRIDEFKPSKEIVENYKNDTHKKGEKFNIEDCHRLIDFFKSSIEKHSDWSKFNFKFSDTSKYADLSGFYREVEHQGYKVTFVNISKDYVNSLVDEGKLYLFQIYNKDFSPYSKGTPNMHTLYWKMLFDERNLENVVYKLNGQAEIFYRKKSINYDRPTHPAHQPINNKNIQNKKKESLFSYDLIKNRRYTVDKFFFHVPITINFKGVDSENINDQVRRYLQKAKDTHVIGIDRGERNLLYLVVVDNKGNIVEQYSLNNIVNEYKGNTYSTDYHALLDAKEKERELARESWQTIENIKELKEGYLSQVIHKITELMIKYHAIVVLEDLNMGFKRGRQKVEKQVYQKFEKQLIDKLNYVVDKHKAPEADGGLLHAYQLTSKFDSFQKLGKQSGFLFYIPAWNTSKIDPVTGFVNLFDTRYVNIEKAKAFFCKFDIIRYNQDKGWFEFDFDYKNFTSKADESRTKWTLCTFGTRVETFRNKEKNSQWDNRNVDLTKAFKELFSKYNIDLSSNIKEAICIQTEKDFFESLLHLLKLTLQMRNSVTGTEIDYIISPVANENGEFFDSRACSDKLPKDADANGAYNIARKGLMLIEQIKKAKDLQKLKFDISNKSWLQYVQNN

SEQ ID NO: 1697 - protein, 1274 aa, unidentified
  REGION 1..1274: note = Description of Unknown: uncultivated organism sequence
  REGION 1..1274: note = Category: MG75 effectors
  REGION 1..1274: note = Description: MG75-183 effector
MNNNLNKFTGLYQLSKTLRFELKPIGKTLDNIQNNGFIANDEHRAESYKQVKKLIDNYHKDYIESVLDNFELNKEVLYSLYELYTCTNKTEKETKQYEAAQDSLRKAISSALKKDERFKRIDKKELIREDMLNYLDNEQDKALVNEFHDFTTYFTGFNENRQNMYAAEAKSTAIAYRLIHENLPKFIDNIAIFKKIAETSVADNFPALYQHYEEYLNVNDIGEIFELDYYNIVLTQKQIEVYNNIIGGRTLSDDTKIKGINEYVNEYNQKQKDKKDRLPKLKPLFKQILSDRVQLSWLQEEFQTGADVLNAIKNYCDTYFADIHESIKALLTSLKEYDLSKIYIPNDLQLTDISQQMFGNWSIIPNAIEQDIKNNNPRKAKEDEEKYSQRIDKIKKQAKSYSLAYINACIKELNNADVATHFASLGAIDNNEKQKASITADIVVHYNQLKPLFGVEYPKEKNLSQDKLTIMQIKDLLDDFKSLQRFVKPLLGNGDEAEKDEKFYGELMQLWEVINNITHLYNKVRNYSTRKPYSTDKIKVNFENAQLLDGWDENKENTNASIILRKNGLYYLGIMKKEHRKLLDKPMPSSGECYEKVVYKFFKDITTMVPKCTTQTKAVATHFKDSGEDYILFDKKNFNEPIVITKEIYELNNVLYDGVKKFQIEYLRTTNDKKGYEHAVNIWKNFCMQFLKAYKSTSIYDLSSIEKNIGNYGDLNSFYSAVNLLLYSLTFRSVSVDYINMLVDEDKMYLFQIYNKDFSTFSKCTPNMHTLYWKMLFDPQNLANVVYKLNGQAEVFFRKKSITIAKPTHPANKPIDNKNPANGKKQSLFDYDLIKDRRYTVDKFQFHVPITINFKSNGSDNINMMVKEHIKTSDDMHYIGIDRGERHLLYLCVIDSKGNIVEQYSLNNIKNEHNGNNYDTDYRNLLQERDKKRKEERSSWQTIEGIKELKQGYLSQVIHKITQLMVKYNAIVVLEDLNMGFKRGRQKVESSVYQQFEKALIDKLNYLVDKKKAPTEPGGLLHAYQLTSKFDSFQKMGKQSGFLFYIPAWNTSKIDPVTGFANLFDSRDTRYENIAKAQAFFNKFDSIRYNEKKDWFELSFDYNNFTSKAEGTQTKWTICTQGTRIETFRNTEKNSNWDSKEVQLTDEWKKLFTEYSIPFKSNLKDAIAQQSNKDFYTKLLSLLKLTLQMRNSITGTDVDYMISPVANVKGEFFDSRNSNATLPENADANGAYNIARKGLWISKQIKEAEDLSKVKLAMSNKDWLQFAQTKPYLE

SEQ ID NO: 1698 - protein, 1274 aa, unidentified
  REGION 1..1274: note = Description of Unknown: uncultivated organism sequence
  REGION 1..1274: note = Category: MG75 effectors
  REGION 1..1274: note = Description: MG75-184 effector
MNNNLNKFTGLYQLSKTLRFELKPIGKTLDNIQNNGFIANDEHRAESYKQVKKLIDNYHKDYIESVLDNFELNKEVLYSLYELYTCTNKTEKETKQYEAAQDSLRKAISSALKKDERFKRIDKKELIREDMLNYLDNEQDKALVNEFHDFTTYFTGFNENRQNMYAAEAKSTAIAYRLIHENLPKFIDNIAIFKKIAETSVADNFPALYQHYEEYLNVNDIGEIFELDYYNIVLTQKQIEVYNNIIGGRTLSDDTKIKGINEYVNEYNQKQKDKKDRLPKLKPLFKQILSDRVQLSWLQEEFQTGADVLNAIKNYCDTYFADIHESIKALLTSLKEYDLSKIYIPNDLQLTDISQQMFGNWSIIPNAIEQDIKNNNPRKAKEDEEKYSQRIDKIKKQAKSYSLTYINACIKELNNADVATHFASLGAIDNSEKQKASITADIVVHYNQLKPLFSVDYPKEKNLSQDKLTVMQIKDLLDDFKSLQRFVKPLLGNGDEAEKDEKFYGELMQLWEVINNITHLYNKVRNYSTRKPYSTDKIKVNFENAQLLDGWDENKENTNASIILRKNGLYYLGIMKKEHRKLLDKPMPSSGECYEKVVYKFFKDITTMVPKCTTQTKAVATHFRDSDEDYILFDKKNFNEPIVITKEIYELNNVLYDGVKKFQIEYLRTTNDKKGYEHAVNIWKNFCMQFLKAYKSTSIYDLSSIEKNIGNYGDLNSFYSAVNLLLYSLTFRSVSVDYINMLVDEDKMYLFQIYNKDFSTFSKGTPNMHTLYWKMLFDPQNLANVVYKLNGQAEVFFRKKSITIAKPTHPANKPIDNKNPANGKKQSLFDYDLIKDRRYTVDKFQFHVPITINFKSNGSDNINMMVKEHIKTSDDMHYIGIDRGERHLLYLCVIDSKGNIVEQYSLNNIKNEHNGNNYDTDYRNLLQERDKKRQEERSSWQTIEGIKELKQGYLSQVIHKITQLMVKYNAIVVLEDLNMGFKRGRQKVESSVYQQFEKALIDKLNYLVDKKKAPTEPGGLLHAYQLTSKFDSFQKMGKQSGFLFYIPAWNTSKIDPVTGFANLFDSRDTRYENIAKAQAFFNKFDSIRYNEKKDWFELSFDFNNFTSKAEGTKTKWTICTQGTRIETFRNAEKNSNWDSKEVQLTDEWKKLFTEYSIPFKSNLKDAIAQQSNKDFYTKLLSLLKLTLQMRNSIIGTDVDYMISPVANAKGEFFDSRNSNATLPENADANGAYNIARKGLWIAKQIKESEDISKVKLAMSNKEWLQFAQTKSYLE

SEQ ID NO: 1699 - protein, 1298 aa, unidentified
  REGION 1..1298: note = Description of Unknown: uncultivated organism sequence
  REGION 1..1298: note = Category: MG75 effectors
  REGION 1..1298: note = Description: MG75-185 effector
MNKSILSRFTNLYQVSKTLRFELQPVGKTKENIEENGILLRDEKRAADCKIVKEIIDEYHKQYIENRLKDFKLPLNSEGKHDSLEEYQALYEMSKRSEADEAAFKEVKDNLRSIIAERLTNAPTYKCIFGKELIRKELVDFLENENTKEIVEFLENEKAKEIVSQFADFTTYFGGFHKNRENMYSGEEKSTAIAYRLIHQNLPRFMDNMKAFERIAATSVAEHFVDIFEGWEEYLNVGSIAEIFRLDYFSDALTQQHIEVYNYIIGKKVLEDGSEIKGINEYVNLYNQQQKDKKLRLPLLVPLYKQILSDREKLSWIAEEFDSDDKMLAAITETYSHLHDLLMGEENESLRSLLVHLKDFDLSRINITNDLSLTDISQHLFGRYDVFTSGIKDELRAITPRKRNETDEQLGDRISKIFKTQQSFSIAFLNTLSQPALEGGNPRKIEDYFMALGAVNTETTQKENLFAQIENAYEDVRAVLQMKETDNMLSQNKQAVAKIKAFLDALKELQHFVKPLLGSGEEDEKDELFYGSFQMMWDELDAITPLYNKVRNWLTRKPFSTEKIKLNFDNAQLLEGWDENKETTNASIILRKDGFYYLGIIRKDCRKLLGAPMPSDGECYDKVVYKFFKDITTMVPKCTTQKKDVVAHFAHSKEDYILFDKKTFNAPVTITKEVYDLNNVLYNGIKKFQIEYLRSTGDKVGYEHAVSTWKSFCMSFLKAYKSTSIYNLALVEQHINSYNDLSSFYNAVNLLLYSLTYRKVSVNFIHSLVDEGKLYLFRIWNKDFSEFSKGTPNLHTLYWKMLFDERNLADVVYKLNGQAEVFYRKSSIKPENRIIHLANKPIANKNELNRKHESTFKYDIIKDRRYTFDKFQFHVPITINFKANGREDINPAVQDCIRRGGFTHVIGIDRGERHLLYLSLIDMQGNIVKQMTLNEIINEYKGNTYKSNYHDLLAKREGERTEARRSWDTIENIKEMKEGYLSQVVHIISKMMVEYNAIVVLEDLNTGFMRSRQKIERQVYEKFEKMLIDKLNCYIDKRADMSDIAGLLHPLQLTCEAKKWKRSHQCGCLFYIPAWNTSKIDPVTGFVNLFDTRYDNMAKAKAFFGKFKSIRYNVSKDWFEFAFDYNNFTTMAEGTRTDWTVCTYGERILTFRNPDKNLQWDDKEVVLTGAFKQLFEKHDIDILDNLKEAICMQTDAQFFKDLLGLMKLLLQMRNSKTGSEVDYLLSPVADEQGNFFDSRKGNATLPDNADANGAYNIARKGLWAIHKIQETAENKKPSLAISNKEWLQFAQTKPYLAD

SEQ ID NO: 1700 - protein, 1064 aa, unidentified
  REGION 1..1064: note = Description of Unknown: uncultivated organism sequence
  REGION 1..1064: note = Category: MG75 effectors
  REGION 1..1064: note = Description: MG75-186 effector
MYSEEEKPTGIAYRLINENLPTFIENFKIYNKVIKFMPEIINKIHTDLMEYIQVEDIDEIFDINYYNEVLTQKGIECYNIIISGKSKSNGEKIKGLNEYINEFNQKHNEKIPKLQELYKQILSDTDTASFKFDTIESDEELLNNIESYYTKLLPVFNKINQLFAKFNKYNLDLIFINNDGTLNTISNEIYKDWSYIRNRIGERYDIEYTGKLKKDTEQYSKQKQEYMKKQKQYSLKFLNDSLRDNYLIEYISNYIEQSKIMERMKTDFTEVQKIESRGDTKQLIKDENSIVKIKNLLDDIKFLQEFVKILVLKDRTIEKDAEFYSELMPYYNELKDIIPLYNKTRNYLTQKPYSTEKIKLNFECPTLLNGWDLNKEEANLGVILLKNEKYYLGIINPYCKKIFKIQEKDSNSENNYKKMEYKLLPGPNKMLPKVFFSKSKIDEFMPSDELLEKYNKGCHKKGKDFDINFCHELIDFYKTSLNKHKDWKKFDFKFKSTSEYNDISEFYKDVEEQGYKIEYSEYSEKYINELVDRGELYLFQIYNKDFSEYSKGRPNLHTMYWKAVFDIENIKNPVYKLNGEAEIFYRKKSLERKITHSANEPVANKNENTIKSGKPTSLFKYDLIKDKRYTVDKFQFHVPITMNFKSEKMFNINQVVNKYLKYNDDINVIGIDRGERNLLYVCVIDKNEKIVYQKSLNEIVNEYKSIKYSTNYHALLNKKEKEREIAREDWKNIENIKELKEGYMSQVIHILVELMRKYNAIIVIEDLNKGFKNSRIKVEKQVYQKFEKMFIDKLNYLVFKDEPKESEGGVLNAYQLTNKFETFNKIGKQSGVLYYIPAWCTSKIDPTTGFINRFYIKYENLDKSKEFINKIDDIRYNSSENLFEFDIDYSKFTDRLNETRNKWTLYTNGERIYTYRNDKGEWIDKKIQLTNEFKKLFEKYSINLDNIKNEILEKANIEFFKGNNETLGFIQLFKLMVQMRNSLTGKEEDNLISPVKNSNGKFFNTNEQIEGLPKDADANGAYNIARKGLMLIEQVRNTEDDKLNKIKYNITEKEWLDYVQNRGM

SEQ ID NO: 1701 - protein, 1287 aa, unidentified
  REGION 1..1287: note = Description of Unknown: uncultivated organism sequence
  REGION 1..1287: note = Category: MG75 effectors
  REGION 1..1287: note = Description: MG75-187 effector
MEKGMKQFTGLYSLSKSLRFELQPIGKTQENIEKHGILERDSQRAEDYKVVKEFIDEYHKQFIKSRLWNYKLPLKNEGQLNSLEEYQEMYEISKRDAAQEASFAQIKYNLRSIIVKRLTESSSSYSRIFKKELIREDLINFLEKEEDQEIVRQFADFTTYFTGFHENRRNMYTAEEKSTAIAYRLIHQNLPKFMDNMKSFAKIAETSVAEHFADIYEGWKEYLNVDSIEEIFQLDYFSETMTQPHIEVYNYIIGKKILEDGTEIKGINEYVNLYNQQQKDKNKRLPFLVPLYKQILSDREKLSWLTEEFDSDEKMLSAINESYSHLHDLLMGEENESLRSLLSHIKNFNLCQINISNDLSLTDISQHLFNRYDVFTNGIKDKLRVITPRKKKESDEDFEDRISKIFKTQKSFSISFLDNLPQPVMDDGKPQSIEDYFMSLGAVNTETTQKENLFAQIENAYEDARTILQMKDTGDTLSQNKSAVVKIKALLDALKDLQHFIKPLLGSGEENEKDELFYGSFQIMWDELDTVTPLYNKVRNWLTRKPYSTEKIKLNFDNAQLLDGWDENKETTNASIILCKNGGYYLGIFNKDYRKLLGTPMPSDGDCYDKVVYKFFKDITTMVPKCTTQKKDVVAHFAQSTENYILFDPKTFKASVTITKEIFDLNNVLYNGVKKFQIEYLRSTGDQSGYEHAVTTWKSFCMQFLKAYKSTSIYNLALVEQQIDSYRDLNSFYNAVNLLLYNLSYKKVSVAYINQLVEEGKLYLFRIWNKDFSEYSKGTPNLHTLYWKMLFDERNLADVVYKLNGQAEVFYRKASIKPENRILHPAQCPIANKNELNEKRSSIFEYDIIKDKRYTVDKFQFHVPITINFKATGQTNINPIVQDTIRRGGFSHIIGIDRGERHLLYLSLIDLKGNIVKQMTLNDIVNEYKGTIHKTNYHDLLVKREGERTDARRSWDTIENIKELKEGYLSQVVHIISKMMVEYNAIIVLEDLNMGFMRGRQKIERQVYEKFEKLLIDKLNCYVDKQIDPSSAGGLLHPFQLTNKFESFRKLGKQSGCLFYIPAWNTSKIDPVTGFVNLFDTRYDTPKKARSFFSKFQRISFNDKKGWFEFSYDYDDFTSKAEGTRTQWTLCTFGDRIRTFRNPKKNHQWDNESVVLTEEFKQLFEKYGIDIHSNLKESISMQSDAQFFKDLLGLMKLLLQMRNSKTNSEEDYLLSPVADETGHFFDSRENIRTLPNNADANGAYNIARKGLWAIRKIKETTQDDKVSLAISNKEWLQFAQTRPYLND

SEQ ID NO: 1702 - protein, 1235 aa, unidentified
  REGION 1..1235: note = Description of Unknown: uncultivated organism sequence
  REGION 1..1235: note = Category: MG75 effectors
  REGION 1..1235: note = Description: MG75-188 effector
MKQLNELTGLYSLSKTLRFELKPIGKTLEHIESKGLIAQDEQRAEEYKKVKDIIDRYHKAFITMCLRDFNFDQNSLETYVALAEDSNRDEKDFDEIKKALRKQIVEAFKKGGSYSDLFKKELIQKHLPEFVKDEEEKKMVENFSKFTTYFSGFNENRKNMYSDEDKSTAIAYRLIHENLPMFIDNMKSFGKIAVSDVSQHFSEIESSFSEYLNVEHLADMFQLDYFSETLTQEQIAVYNHIVGGRTLEDGTKLQGVNEYVNLYNQQHKDNRLPLLKPLYKMILSDRVALSWLPEEFASDEEMINAINETYNTLKDVLMGNGDNSLRNLLLNIDKYDVEHIYIGNDLGLTDISQQLFGQYDVYTSAIKQELRNSVSPTAKERREPELYAERINKLFKSAKSFSILYLNSLVDSEHTIQSYYKQLGAYDRGGEQRINLFSQIEMAYVAAKDILSGKHGNISQSDADTAIIKNLLDAYKSLQRFIKPLLGDGEEADKDNEFDAKLREAWDALDIVTPLYNKVRNWLTRKPYSTEKIKLNFENAQLLGGWDVNKEPDCTSVLLRKNGFYYLAIMNKKYNHAFDIDNLPHNGKCYEKIDYKLLPGANKMLPKVFFSNSRIKEFAPSDAIVSAYRKGTHKKGSNFNISDCRRLIDFFKASIMKHEDWKKFPFSFSPTETYEDISGFYREVEQQGYMLGFRNVSESFINQLIDEGKLYLFQIWNKDFSEFSKGTPNMHTLYWKMLFDERNLANVVYKLNGQAEVFYRKRSLDVANTTIHKAHQPIVNKNQENKKLQSTFEYDIIKNRRYTVDKFQFHVPISINFKAIGRDNVNDNVLDIIRNGGIKHIIGVDRGERHLLYLSLIDLNGNIVKQMTLNDIVNEYNGNTYATNYRDLLAEREGNRTEARKNWKEIENIKDIKQGYLSQVVHIISKMMVEYDAIVVLEDLNMGFMRGRQKIERSVYEQFEKMLIDKLNYYVDKQKSVNEAGGLLHALQMTSKFESFKKLGKQSGCLFYIPAWNTSKIDPVTGFVNLFDTRYTNADQARRFFSQFDVIRYNADKDWFEFAFDYNNFTAKAEGTRTKWTLCSYGTRIRTFRNPAKLNQWDNEEVVLTDEFKKAFANAGIDIHGNLKEAISSLQDKKYLEPLMHLMKLLLQMRNSITNSEVDYLLSPVADENGKFYDSRTCSDSLPKDADANGAYNIARKGLWAIRQIQETPAGERPNLAIKNKEWLNFAQQKPYKDE

SEQ ID NO: 1703 - protein, 1245 aa, unidentified
  REGION 1..1245: note = Description of Unknown: uncultivated organism sequence
  REGION 1..1245: note = Category: MG75 effectors
  REGION 1..1245: note = Description: MG75-189 effector
MTLIIKYKESKNKREVYMSNLYSNLHNLYQVQKTLRFELKPQGKTKENMEKVGILEADEHRAEIYSKVKKYCDEYHKLFIDKSLSNIELNGIDRYYELYSINNRDDKQKEELDQLETGLRKQISDAFKKSAEYKGLFQKDMITSYLVTMYKENQEKMQDIGEFNRFTTYFTGYNKNRENMYSEEDKSTAISYRLINENLPTFIDNIKIYKKIVSLMPEDIEKIYKDLEEYIQVDSIDEIFNISYYNDVLTQRGIECYNILISGRTKNDGDKIKGLNEYINEFNQTHNEKIPKLQELYKQILSDAESASFKIDVIKNDKELMNLIEVYYANILPILNKIEDLFTRISNYNLELILVNNDGTLSTLSNMVFNEWSYIKGAISEKYDEKYSGKEKYGTEKYAQKKQEYLKKQKIYSLKFLNDCIGNNAICEYLKNYIIQNKNIETIKEDYNEVQNIKVEDDTKELIKDEKSIEKIKKFLDDVKSLQEFVKLVIPKDRTVEKDAKFYSELTPYYEKIKEIIPLYNKVRNYVTQKPYSTEKIKLNFECPTLLNGWDANKEEANLGVILIKEGKYYLGIINPYCKKIFEIDEKDSNEQKNYKKMEYKLLPGPNKMLPKVFFSNSRIEEFNPSKELQEKYNKGYHKKGKDFDINFCHELIDFYKMSLNKHEDWKKFNFKFKDTSEYNDISEFYREVEKQGYKIEYTEYSEKYINELVDRGELYLFQIYNKDFSEYSKGKENLHTLYWKAVFDPDNIMNPVYKLNGNAEVFYRKKSLEMKVIHPANQPIANKNISTIEAGRSTSTFKYDLIKDKRYTMDKFQFHVPITVNFKSERLFNINQIVNKYLKYNDDIHVIGIDRGERNLLYVCVIDKNEKIVYQKSLNEIVSEYNNNRYTTDYHGLLDRKEKEREIAREDWKNIENIKELKEGYMSQVIHILVELMKKYNAIIVIEDLNKGFKNSRIKVEKQVYQKFEKMFIDKLNYLVFKDEDKMNEGGVLNAYQLTNKFESFTKLGKQSGILYYIPAWCTSKIDPTTGFINRFYLKYENFDKSKEFVNRIDDIRYNEKENLFEFDIDYSKFTDRLNDTKNKWTLCSYGERILTQKNANGEWFDRRIQLSIEFKKLFERYGINLNNIKDSILKLDKDNLEFYKGNGESLGFIQLFKLMVQMRNSLTGKEEDNLISPVKNRHGKFFNTSEKIEGLPIDADANGAYNIARKGFMLVEQMKNVEDEKLNKIKYNITEKEWLNYVQNRGM

SEQ ID NO: 1704 - protein, 1239 aa, unidentified
  REGION 1..1239: note = Description of Unknown: uncultivated organism sequence
  REGION 1..1239: note = Category: MG75 effectors
  REGION 1..1239: note = Description: MG75-190 effector
MEEFNQFTGLYPLSKTLRFELKPVGKTLENIVKHGLLEEDKHRADSYEKVKKIIDEYHKVFIDNALSDFKLKNGESKKNETLDQYFALYNKREKDENDKKDFSEIQKSLRKQIVDRLTGNEKYKNIFKKELIKQDLLEFCNEDDRKYVEEFKDFTTYFNGFNENRANMYSAEEQSTAIAYRLIHDNLPKFVDNINSFNKVLAVPEINEKLPKLYKDFESYLNVESISEMFQLDYFNMVLTQKQIDVYNAIIGGKDDGNEKIQGLNEFINLYNQKHKDTRLPKLKVLYKQILSDRNAISWLPEEFKDDNEVLIAINSCYKDLSEHVLGEKNLKILLENISQYQLDGIFIKNDFQLPYISQKLLGNWSVIQNAIIEDSKSFIKKKGKESENEYESRLNEKYKKQNSFSVAYINECLKNAGKEIGVENYFSALGAVHTETEQRENLFARISNAYSIVSDLLNAQYPEGRNLSQDKQNVSKIKDLLDALKALQHFIKPLLGNGDESGKDEKFYGEFTALWDELNKITSLYNMVRNYVTRKPYSEEKIKLNFQNSTLMDGWDYNKERDNTAVILRKDGLYYLGIMNKKYNKIFEPENVKHDGECFEKMIYKLLPGANKMLPKVFFSKSRIDEFKPSKEIVENYKNDTHKKGEKFNIEDCHRLIDFFKSSIEKHSDWSKFDFKFSDTSKYADLSGFYREVEHQGYKVTFVNISKDYVNSLVDEGKLYLFQIYNKDFSPYSKGTPNMHTLYWKMLFDERNLENVVYKLNGQAEIFYRKKSINYDRPTHPAHQPINNKNIQNKKKESLFSYDLIKNRRYTVDKFFFHVPITINFKGVDSENINDQVRRYLQKAKDTHVIGIDRGERNLLYLVVVDNKGNIVEQYSLNNIVNEYKGNTYSTDYHALLDAKEKERELARESWQTIENIKELKEGYLSQVIHKITELMIKYHAIVVLEDLNMGFKRGRQKVEKQVYQKFEKQLIDKLNYVVDKHKAPEADGGLLHAYQLTSKFDSFQKLGKQSGFLFYIPAWNTSKIDPVTGFVNLFDTRYVNIEKAKAFFCKFDIIRYNQDKEWFEFGFDYKNFTSKADESRTKWTLCTFGTRVETFRNKEKNSQWDNRNVDLTKAFKELFSKYNIDLSSNIKEAICIQTEKDFFESLLHLLKLTLQMRNSVTGTEIDYIISPVANGNGEFFDSRTCSDKLPKDADANGAYNIARKGLMLIEQIKKSKDLKKLKFDISNKSWLQYVQNN

SEQ ID NO: 1705 - protein, 1150 aa, unidentified
  REGION 1..1150: note = Description of Unknown: uncultivated organism sequence
  REGION 1..1150: note = Category: MG75 effectors
  REGION 1..1150: note = Description: MG75-191 effector
MLNFLVKKEDRDIVQQFADFTTYFTGFHENRRNMYSSEEKSTAIAYRLIHQNLPKFMENMKAFATIAQTSIAEHFADIYAGWEEYLNVGSIEEMFNLDYFSHTLTQTGIEVYNYIIGKKILEDGTEIKGINEYVNLYNQQQKDKKQRLPLLIPLYKQILSDREKLSWISEEFDSDEKMLAAINGLYIHLHDLLMGKENESLRSLLIYLKDFNLEHIYITNDQSLTNISQHLFKQYDVYTQGILNHLRVNTPRKKKETDEDFEKRISQILKSKKSFSIAFLDHLPHPITEEGKPKSIEDYFQALGAVDSETIQKENIFAQIENAYENVYEVLQLKETGNSLSQDKSAVAKIKVLLDAFKELQHFIKPLLGSGEENEKDELFYGTFQMMWDELEAITPLYNKVRNWMTRKPYSTEKIKLNFDNAQLLDGWDENKETTNASIILRKGSYFFLGIMNKNYRQLLDKPMPSDGDCFDKVVYKFFKDITTMVPKCTTQMKSVAEHFKHSSEDYILFDKKKYNTPVVITKEIYELNNVTYNGTKKFQIEYLRSTGDSEGYQHALTVWKAFCLKFLKAYISTSVYDLTLIEQNINSYKNLSTFYNAVNLLLYNISYKRVSTEYINTLVDEGKLYLFRIWNKDFSEFSKGTPNLHTLYWRMLFDERNLADVVYKLNGQAEVFYRKASIKPENLIIHPANQAIANKNILNRKKTSTFEYDIIKNRRYTVDKFQFHVPITINFKAIGQKNINPIVQETIRNNGFTHVIGIDRGERHLLYLSLIDLKGNIIKQMTLNEIINEYNGQCFVTNYHNLLVAREGDRTKSRKSWDTIETIKELKEGYLSQVVHIISKMMIEYKAIVVLEDLNVGFMRGRQKIERQVYEKFEKMLIEKLNCYVDKQADPASEGGLLHPLQLVNESKSFQKHGKQCGCLFYVRAWNTSKIDPTTGFVNLFDTRYETREKARVFFSKFKRISFNKEKDWFEFSFDYNDFTTKADGTRTQWTLCTNGTRIRTFRNPLKNNQWDDEEIILTDQFKELFSKYQIEITGNLKDSINRQSEAAFYKDLMSLMKLLLQMRNSKTNSEVDYLFSPVADEQGVFYDSRNCGANLPNNADANGAYNIARKGLWVIRKIQSTSIDEKISLAITDKDWLNFVQNKSYLID

SEQ ID NO: 1706 - protein, 1239 aa, unidentified
  REGION 1..1239: note = Description of Unknown: uncultivated organism sequence
  REGION 1..1239: note = Category: MG75 effectors
  REGION 1..1239: note = Description: MG75-192 effector
MEEFNQFTGLYPLSKTLRFELKPVGKTLENIVKHGLLEEDKHRADSYDKVKRIIDEYHKAFIDNALSDFKLKNGESKKYETLDQYFALYNKREKDENDKKDFSEIQKSLRKQIVDRLTGSEKYKNIFKKELIKHDLLKFCNEDDRKYVEEFKDFTTYFNGFNENRANMYSAEEQSTAIAYRLIHDNLPKFVDNINSFNKVLAVPEINEKLPKLYKDFESYLNVESISEMFQLDYFNMVLTQKQIDVYNAIIGGKDDGNEKIQGLNEFINLYNQKHKDTRLPKLKVLYKQILSDRNAISWLPEEFKDDNEVLIAINSCYKDLSEHVLGEKNLKILLENISQYQLDGIFIKNDFQLPYISQKLLGNWSVIQNAIIEDSKSFIKKKGKESENEYESRLNEIYKKQNSFSVAYINECLKNAGKEIGVENYFSALGAVHTETEQRENLFARISNAYSIVSDLLNVQYPEGRNLSQDKQNVSKIKDLLDALKALQHFIKPLLGNGDESGKDEKFYGEFTALWDELNKITSLYNMVRNYMTRKPYSEEKIKLNFQNSTLMDGWDYNKERDNTAVILRKDGLYYLGIMNKKYNKIFEPENVKHDGECFEKMIYKLLPGANKMLPKVFFSKSRIDEFKPSKEIVENYKNDTHKKGEKFNIEDCHRLIDFFKSSIEKHSDWSKFNFKFSDTSKYADLSGFYREVEHQGYKVTFVNISKDYVNSLVDEGKLYLFQIYNKDFSPYSKGTPNMHTLYWKMLFDERNLENVVYKLNGQAEIFYRKKSINYDRPTHPAHQPINNKNIQNKKKESLFSYDLIKNRRYTVDKFFFHVPITINFKGVDSENINDQVRRYLQKAKDTHVIGIDRGERNLLYLVVVDNKGNIVEQYSLNNIVNEYKGNTYSTDYHALLDAKEKERELARESWQTIENIKELKEGYLSQVIHKITELMIKYHAIVVLEDLNMGFKRGRQKVEKQVYQKFEKQLIDKLNYVVDKHKAPESDGGLLHAYQLTSKFDSFQKLGKQSGFLFYIPAWNTSKIDPVTGFVNLFDTRYVNIEKAKAFFCKFDIIRYNQDKGWFEFGFDYKNFTSKADESRTKWTLCTFGTRVETFRNKEKNSQWDNRNVDLTRAFKELFSKYNIDLTSNIKEAICIQTEKDFFESLLHLLKLTLQMRNSVTGTEIDYIISPVANENGEFFDSRTCSEKLPKDADANGAYNIARKGLMLIEQIKKAKDLQKLKFDISNKSWLQYVQNN

SEQ ID NO: 1707 - protein, 1236 aa, unidentified
  REGION 1..1236: note = Description of Unknown: uncultivated organism sequence
  REGION 1..1236: note = Category: MG75 effectors
  REGION 1..1236: note = Description: MG75-193 effector
MKQLSELTGLYSLSKTLRFELKPIGKTLEHIESKGLIAQDEQRAEEYKKVKDIIDRYHKKFITMCLSDFKFEQNSLETYVALAEDTNRDEKAFDEIKKTLRKQIVETFKKGGSYSDLFKKELIQKHLPEFVSDEEEKKMIANFSKFTTYFNGFNENRKNMYSDEDKSTAIAYRLIHENLPMFVNNMKSFSRIADSDVHQHFTEIESSFSEYLGVEHLEEMFQLDYFSETLTQEQIAVYNHIIGGRALEDGTKLKGINEYVNLYNQQHKNSRLPLLKPLYKMILSDRVALPWFPSEEFASDEEMIRAINETYNTLKEVLSIDGDSSLRSLLLNISSYDIKHIYIANDLGLTDISQQMFGQYDVYTSAIKQELREKNAPTAKERRNPELYDERINKLFKSAKSFSIEHLNSLVDSEHTIQNYYKHLGAYDRNGEQRVNLFTQIEMAYVAAKEILSGKHGNISQSDAETAIIKGLLDAFKSLQRFIKPLLGNGEEADKDNEFDAKLREAWNTLDIVTPLYNKVRNWLTRKPYSTEKIKLNFENAQLLGGWDVNKEPDCTSILLRKNGLYYLAIMNKKYNHAFDIDNLPNDGKCYEKIDYKLLPGANKMLPKVFFSKSRIKEFAPSEIIVNAYKKGSHKKGANFSISDCRRLIDFFKASISKHEDWKNFPFSFSSTEKYEDISGFYREVEQQGYMLGFRNVSESFIKQLVDEGKLYLFQIWNKDFSDFSKGTPNMHTLYWKMLFDEHNLANVVYKLNGQAEVFYRKSSLDVANTTIHKAHQPIMNKNQEYKKRQSTFDYDIIKNRRYTVDKFQFHVPISINFKATGRDNVNDNVLDIIRNGGIKHIIGIDRGERHLLYLSLIDLKGNIVKQMTLNDIVNEYNGNTYATNYKNLLAEREGNRTEARKNWKKIENIKDIKKGYLSQVVHIISKMMVEYNAIVVLEDLNMGFMRGRQKIERSVYEQFEKMLIDKLNYYVDKQKNSDEAGGLLHALQLTSKFESFKKLGKQSGCLFYIPAWNTSKIDPVTGFVNLFDTRYTNADQARKFFSQFDSIRYNADKDWFEFAFDYNKFTAKAKDTRTKWTLCTYGTRIRTFRNPARLNQWDNEEVVLTDEFKKAFANADINIHGNLKEAICSLQDKKYLEPLMHLMKLLLQMRNSITNSEVDYLLSPVADENGTFYDSRICSASLPKDADANGAYNIARKGLWAIHQIQESPAGDRLNLAIKNKDWLNFAQQKPYMNE

SEQ ID NO: 1708 - protein, 700 aa, unidentified
  REGION 1..700: note = Description of Unknown: uncultivated organism sequence
  REGION 1..700: note = Category: MG75 effectors
  REGION 1..700: note = Description: MG75-194 effector
METFSGFTNLYPLSKTLRFRLIPVGETLKHFIGSGILEEDQHRAESYVKVKAIIDDYHRTYIENSLSGFELPLESTGKFNSLEEYYLYHNIRNKTEEIQNLSSKVRTNLRKQVVTQLTKNEIFKRIDKKELIQSDLIDFVKNEPDANEKIALISEFRNFTVYFKGFHENRRNMYSDEEKSTSIAFRLIHENLPKFIDNMEVFAKIQNTSISENFDAIQKELCPELVTLCEMFKLGYFNKTLSQKQIDAYNTVIGGKTTSEGKKIKGLNEYINLYNQQHKQEKLPKMKLLFKQILSDRESASWLLEKFENDSQVVGAMVNFWNTIHDTVLAEGGLKTIIASLGSYGLEGIFLKNDLQLTDISQKATGSWSKISSEIKQKIEAMNPQKKKESYESYQERIDKLFKSYKSFSLAFVNECLRGEYKIEDYFLKLGAVNSSLLQKENHFSHILNTYTDVKEVIGFYSESTDTKLIQDNDSIQKIKQFLDAVKDLQAYVKPLLGNSDETGKDERFYGDLIEYWSLLDLITPLYNMVRNYVTQKPYSVDKIKINFQNPTLLNGWDLNKEMDNTSVILRRDGKYYLAIMNNKSRKVFLKYPSGTDRNCYEKMEYKLLPGANKMLPKVFFSKSRINEFMPNERLLSNYEKGTHKKSGTCFSLDDCHTLIDFFKKSLNKHEDWKNFGFKFSDTSTYEDMKCTENSCQFED

SEQ ID NO: 1709 - protein, 1283 aa, unidentified
  REGION 1..1283: note = Description of Unknown: uncultivated organism sequence
  REGION 1..1283: note = Category: MG75 effectors
  REGION 1..1283: note = Description: MG75-195 effector
MKQFSNLYQVSKTLRFELQPIGKTKENIESGGILQKDEQRAVNYKIVKGFIDEYHKQHIKNCLWNFELPLFNEGKHDSLEEYKILYETPQRNAVQEAAFTEVKDNLRAIIVKQLTKKGTAFDRIDKKELIREDLLNFLVKKEDRDIVQQFADFTTYFTGFHENRRNMYSSEEKSTAIAYRLIHQNLPKFMENMKAFATIAQTSIAEHFADIYAGWEEYLNVGSIEEMFNLDYFSHTLTQTGIEVYNYIIGKKILEDGTEIKGINEYVNLYNQQQKDKKQRLPLLIPLYKQILSDREKLSWISEEFDSDEKMLAAINGLYIHLHDLLMGKENESLRSLLIYLKDFNLEHIYITNDQSLTNISQHLFKQYDVYTQGILNHLRVNTPRKKKETDEDFEKRISQILKSKKSFSIAFLDHLPHPITEEGKPKSIEDYFQALGAVDSETIQKENIFAQIENAYENVYEVLQLKETGNSLSQDKSAVAKIKVLLDAFKELQHFIKPLLGSGEENEKDELFYGTFQMMWDELEAITPLYNKVRNWMTRKPYSTEKIKLNFDNAQLLDGWDENKETTNASIILRKGSYFFLGIMNKNYRQLLDKPMPSDGDCFDKVVYKFFKDITTMVPKCTTQMKSVAEHFKHSSEDYILFDKKKYNTPVVITKEIYELNNVTYNGTKKFQIEYLRSTGDSEGYQHALTVWKAFCLKFLKAYISTSVYDLTLIEQNINSYKNLSTFYNAVNLLLYNISYKRVSTEYINTLVDEGKLYLFRIWNKDFSEFSKGTPNLHTLYWRMLFDERNLADVVYKLNGQAEVFYRKASIKPENLIIHPANQAIANKNILNRKKTSTFEYDIIKNRRYTVDKFQFHVPITINFKAIAQKNINPIVQETIRNNGFTHVIGIDRGERHLLYLSLIDLKGNIIKQMTLNEIINEYNGQCFVTNYHDLLVAREGDRTKSRKSWDTIETIKELKEGYLSQVVHIISKMMIEYKAIVVLEDLNVGFMRGRQKIERQVYEKFEKMLIEKLNCYVDKQADPASEGGLLHPLQLVNESKSFQKHGKQCGCLFYVRAWNTSKIDPTTGFVNLFDTRYETREKARVFFSKFKRISFNKEKDWFEFSFDYNDFTTKADGTRTQWTLCTNGTRIRTFRNPLKNNQWDDEEIILTDQFKELFSKYQIEITGNLKDSINRQSEAAFYKDLMSLMKLLLQMRNSKTNSEVDYLFSPVADEQGVFYDSRNCGANLPNNADANGAYNIARKGLWVIRKIQSTSIDEKISLAITDKDWLNFVQNKSYLID

SEQ ID NO: 1710 - protein, 663 aa, unidentified
  REGION 1..663: note = Description of Unknown: uncultivated organism sequence
  REGION 1..663: note = Category: MG75 effectors
  REGION 1..663: note = Description: MG75-196 effector
MIPKCSTQLNKVKEHFAKSSTDITVFDSKTFTSPITITKEIFDLNNVTYDGKKKFLKEYLEKTGDQKGFSDALSTWKHFCLQFLKAYKSTANYDFSEIERNIDSYSDLPLFYQELNNILYKITFERVSADFIHQLVNEGCLYLFQIYSKDFSPYSKGKPNLHTIYWRMLFDEENLSNVVYKLNGEAEIFFRPSSIKCTGPTHLANRPIENKSEYNKKNKPSSTFGYDLFKDRRYTKDQFEFHVPITLNFKQPKPSMFNDEVRTFLKENGVRHIIGIDRGERNLLYLVMVDLDGNIIKQYSLNRIASNANNSNFEQDFRDILHKREGDRQEARRNWSTIQNIKELKEGYMSLVVHEIVKLMLKEDAIVVLESLNRSFMQIRGGIEKSVYQKFEKMLIDKLGYIVDKDKAPTENGGALHAIQLADTFENYNKYQSGIVRQCGFIFYVPAWCTSKIDPTTGFVPMLKCKYENIDSSQTFFSKFDSIRFNEAEEYFEFKTNYANFYTSSKGGKQQWNICTFGERILTQRAKDGHFESKTIALAPAFKELFAQAGINIQGNIKAQIVKQNDASFFKELHHLLRLTLQMRNSNSTTGDDYIISPVKNKDGEFFDSRRSGEKLPQDADANGAYNIARKGLMLLQQLNATKADSKFKPEISNEKWLEFAQK

SEQ ID NO: 1711 - protein, 1376 aa, unidentified
  REGION 1..1376: note = Description of Unknown: uncultivated organism sequence
  REGION 1..1376: note = Category: MG77 effectors
  REGION 1..1376: note = Description: MG77-1 effector
MTVDNSAYYDSYTGRYPIRRTVQFSLIPQGETQKWIDQYGFVSADEKRDEDYKELKKIIDNYHRDFIARALDSFKKAIDWNNLIEALEQFQQSNETDKPKARKELEKVQANYQSEIAEAFRKQDDFNSLFKKDLITKILPDSINDEDKNELLARFRQFTSYFTGFNENRRNLYSDEAKATAISHRIVNENFPRFYANCKDWERLNKLYHGFGLQVQDSIEKLDQDIDIAQYFEPKNYSLVLTQEGIDVYNMILGGGFDSSRKKVSGLNNLANECWQKARSNERNGSQSEGIEEQRAPHKIILQQLHRQILSENVSSWSQLFEQYKNDGEVYDALKTLNKELLQPRNEEVSFLDQVVDLFRKLKEFDPAVIQVRSNRFFSFSRTCFGDGFYLENAIASCVDEKLAPVQGLSASVRNKWAKKEQRTLREIAQIVYAAEKSLKAKDADAIDLPNEQVWEILHVDNLIEDFYETRDEIVVREERLEEDLTGAKPDARKLMQKGELVQKIKAFLDSLLNYQRALQVFSLDANEERNPEFYAYYDSLRENWSIVPQIYDRVRNYVTQKPYSKEKFKLTFENPSFLNGWSLDKQDENYGALFLQDGKYYLGILNPNNKIKFESLHDAVEDKTEGVFQKVDYNLFPGATKMIPKCSIARNDVKNHFRKSKSDCSLDNEKFIKPLRIPYRIMELNYDMTADQPEKLKLKKYQVEYKRSTGDEAGFTEALADWIDFCLDFLESYRNTAGYDFSFCYGKEYKSLDQFYNDVDRITYSLSLRDVSKRQIDQLISDGKLFFFQLYNKDFAEKATGKKNLHTLYFEALFSKQNLNETVFKLDGEAEMFYRPASIDSPFTHNVGEYVVNRTYTEVIDGKEERKSLKDYVHRELYEFANGKKAKSKLSKDAIRAIELGHYTPKEVTHAITRDKRFSQPQYSLHIPLTINFGTKPIGGRDNNSDILKSIKRDKDIAIIGIDRGERNLLYYSVIDQAGKILDQGSLNAINGVDYHEKLDLRERERNEQRQSWKSIDKIKDLKKGYLSVAVHEIVSLMLKHNAVIVMEDLNAGFKRSRTKFEKQIYQNFEKQLIDKLNYCVIKPKTQGTSDEASNRGEHRDLDAPGGVLCGYQLANQFESFQKLGKQCGSIFYVPAWNTSRIDPTTGFVNLFRAAELRYKNLQQVQSFFQRFDGIRFNKDEDWFEFTFSYSNFNTSGTSLIDEWTVCARDVELPIVVKDDNEGRWNRQNTKNETINIKNKLEGLFAEYGIDYKSGEDLIEAITFINHSGFYKELLKYFKTLIALRHSTKAGTTPAVDCIVSPVMNEAGYFFDSREASPAFPQDADANGAYNIALKGLQIAKEFIDEATDAPWRVTYKNSNNEWLRFVQERAWKNQ

SEQ ID NO: 1712 - protein, 1234 aa, unidentified
  REGION 1..1234: note = Description of Unknown: uncultivated organism sequence
  REGION 1..1234: note = Category: MG77 effectors
  REGION 1..1234: note = Description: MG77-2 effector
MSNFYSTFINLRPVSKTLRFSLIPIGKTRENIRSAEIISQDEKKSQDYVILKDVFDTYHKAYIDQHLCRIQGDWSELAKALEERQSSQSAETLNRVQTAYRKEIAKLLISEKATKLGKNDHLFLADDGVTFLQKNDLAKLIKLTVDEKRAAERENRRPEYLIPELGEHIKAVEQFDRFAGYFLAYQQARNNIYTDEGSTSVAHRVVNENFPKFMANIHTYRRLPESLKQEFEHSLEDLLYGVPLETVFSTDYFNAVLAQTGIERYNTLLGGKTEEGGVKIQGLNELCNLAFQQGILPKKVVFVPLYKQILSDRDRASFLPEKFKSAVEMLTALGHFMTELNEMIAAEHESVADNIKSGICDSDRVYIGKSQLASLSMLCFDNWNKLRDAVRPKEVYSLSELQLVSEKDILGIVREQFLAKLGKITEASTSLPPVLKKETLREEDYSKIKTYLDAVIDAQHLLKIFDADDDADKDSVFYGTSDALNETLRKGIPLYDKVRNFATGKPYSEEKFMLTFDAPTLLNGWDKNKERDNCCMLFRRDGLYYLGILNAKDKPTLTEEAEIDGPSYEKMVYKYLPTPSKMLPKVFNKSGRWIAAHGLDDEIRDGYEKGLHKVGPDFDPVFMHKLVDYYKVCISQYEDWATFRFRFSDTETYRTMADFYGEISAQSYNVSFTKVSERQINDAVDAGQMYLFQIYNKDFSEFSHGAPNLHTIYWRELFSAENLKNPLVKLNGEAEIFYRHPSVKNPFRHQKGDVLINKVDAEGVTVPDARYRTAASDAASSMPLEILRASYPELIFKIADREIVKDNRYTKESFAFHVPLTLNYGCDAGIRLNQTVCEKLQSDEPYYIMGIDRGERNLIYISVIDRHGRIVEQRSLNVVGQNKVDYQAKLDTLERERQDARKNWRAITAIKELKEGYLSFAIHEITELMMRYPCILVMEDLNFGFKRGRFHVEKQVYQKFEKMLIDKLGFCMLKDRTPEEEGSVRHAYQLTEPFESFQKLGKQSGVIFYVPAAYTSKIDPLTGFVNLFTSAQLNYTSVEAARTFFGTMREIGYDAQRDCYRFAFRYGDYDLNKKDYTDAWTVYTAGEDRIAHSVKNGRHEYETVDVTKRMKALFARFGIDPYASDLRAAIAAVDKKEFFSELLRLFRTTVQLRYEDQTQDFILSPVEKDGRFFDSRTAERDLPQDGDANGAYHIALQGLRLVWERIENGKVKTDGKGEQSYNWFRFVQKKEYRK

SEQ ID NO: 1713 - protein, 1236 aa, unidentified
  REGION 1..1236: note = Description of Unknown: uncultivated organism sequence
  REGION 1..1236: note = Category: MG78 active effectors
  REGION 1..1236: note = Description: MG78-1 active effector
MQQFIGVYPDSKTLRFKLIPIGRTLEMMEKNAIIQNDTKKYEGYKRLKKIIDEYHKAFMDHSLKDLYLEGLEEYSELYNRSKRDVSQEKKYKELQANLRKQVINAIKKDPQFKRLFKKELITEDLYKFVGDNEEIIDLLQEFSEYTTYFTGFHQNRENMYTDEEKSTSIAYRLVNQNLPKYLDNIKIYELLMTSSVAEQVEGLEKELRSLYGVLSIKDYFTIDGFNLVLTQKGIDVYNTILGAYAKENGEKVQGLNEIINIYNQHVKEKAKRIPIMKELYKQILSDRDTVSFVNEKFESDEDVFEAIDLFSTELEQTIIMPQNDMAVKALLLNIADYDLKHIYINNDSFITTISKYLYGDWSCIHSAISDHYDALKGGKVKDRKYEEKKQKELKQVADYSISDLDNYVSKYKNESKKMEDYFTEQCASILAEIEKTKEKYLELSAHCKDKEDSAIRKDDKNIGIIKEYLDAIKKLQRLLKSLVLGQQEPDKDELFYGELIRIWDALNGITHLYNQVRNYVTQKPYSLEKIKINFEKSTLLAGWDKNKERDNLGVLLLKDGNYYLAIMDRKHNKSFLEVKAATSDVYQKMNYKLLPDPSKMLPKVFFSQKRIQEFAPGEEILQIRESGSFKKGDNFNLEDCHKLIDFYKASINKHEEWKNFGFSFSDTKDYADISGFYKEVSDQGYKITFEDVDADYIDRLVEEGKLYLFKIYCKDFSPYSTGKPNLHTMYWRALFDEENLKDIVYKLNGQAEVFYRKASIPLKITHPANEPIHNKDLNAKKQTSVFPYDLIKNRRYTCDQFQLHVPITMNFKASGENRFNKRVNQYIHDTKGMHVIGIDRGERNLLYICVIDENGKIVYQKSLNEIISCRTNEEANEGHCVDYHLLLDAREKQNKEARENWTTVNSIKELKEGYLSQVIHIITDLMIRYNAIVVLEDLNFGFMRGRQKFEKQVYQKFEKMLIDKLNYLVDKDKEWTEDGGVYRAYQLTDKFKSFQMLGKQSGFLFYIPAWMTSKIDPSTGFVNLFYTKYENMEAAKNFIHKFKRISYNEEKAYFEFEFDYKDFTYKADGTKTDWTVCSSGMRIKHFRDHEKNNNWSTKTIYLTDDFKELFDEYEVKLQADNMQDQLLGLSDVHFYKKFMELFSLMVQMRNSNEEGEDNITSPVLNQNGEFFCTHKNERGSDRIIPEDADANGAYNIAKKGVLIIEKIRKTDVNDLDKVKLAISNKEWLQYAQEHIL

SEQ ID NO: 1714 - protein, 1235 aa, unidentified
  REGION 1..1235: note = Description of Unknown: uncultivated organism sequence
  REGION 1..1235: note = Category: MG78 effectors
  REGION 1..1235: note = Description: MG78-2 effector
MNRILADDFIGMYPVSKTLCFELRPIGKTLEHIERDGIIDTDVIRSENYAKVKKIIDEYHKAFIQKVLAKVQLDGLEDYYRFYNTIRRTDREEKAFLNCQENMRKQLSKAFKDDDAFKTIDKKELIKNDLVSFFAEDREKLDLIREFSDFTTYFTGFHQNRQNMYSDEAKSTSIAYRIVHENLPKYFDNIKVYDQIMATSISEQVAELESNLCVVFENFGKIGDYFIIPGYNAVISQEGIDRYNTIIGGYSEEDGKKIQGLNEIVNLYNQKHKVHLPKFKLLFKQILSDRERISFIPDEFASDIEVFDAVQGLLQRLDEELFENGEDNITISELFSDLSIYDLNGIYVTNDSSITTISQELFDDWSVIRNAIDRKYEEMNPIRRMKQEKYDEKKTTELKKIKSYSIGNLNALMEENLKSEGIEKYFTEKITHALLEIRTASENYRKIDVDKYQVGRALKGNDRDISLIKGLLDSLKELQWIIKPLNAGFEEAEKDELFYGEYTRIWDTLEAITPLYNKVRNYVTGKPYSTEKVKLNFGRATLLNGWDKNKERDNLGIILLKDNNYYLGIMNRDNTQCIDEAPQAGSEKVYEKMNYKLLPGPNKMLPKVFFSKSRIDEFSPTPELMHNYKKGTHKKGDLFNLDDCHKLIDFFKASIEKHEDWSQFGFQFSETGSYAELNDFYKEVSQQGYKITFSNIDESYIDKLVDEGSLYLFQIYNKDFSPYSKGTPNLHTLYWKAVFSKENLDNVVYKLNGEAEVFFRKASIRQEDIIVHPAGKEVANKDPFNEKKTSLFSYDIVKDRRFTCDKFSFHVPITMNFKADKQRNINERVNLALRAAKDIHIIGIDRGERNLLYVSVIDMNGKIVEQMSLNELLSYDKNKNLHRRDYHQILTERERENKSARQNWTTINTIKELKEGYLSQVVHVITDLMIKYNAIVVLEDLNFGFKRSRQKFERQVYQKFEKMLIDKLNYYVDKQKNYDENGGLLKAYQLTAKFTSFQTLGKQSGFLYYVPAWNTSKIDPTTGFTNLFSLRYESVEKTKAFIRNMDRIWYDADTGAYALSFNYDRFTYKAEGTKTDWIIYTFGKRIEHFRNKEKNSEWDVKYIDLTESFSELLAEYGISRELEDIKGEMLNISDAEFYKRFMKILSLTLQMRNSDEVNGVDEIISPVKNRRGEFFISGTCKDLPVDADANGAYNIAKKGLWLVEKIKETPEEDIANVKLALSNKEWLKFAQDNTL

SEQ ID NO: 1715 - protein, 1235 aa, unidentified
  REGION 1..1235: note = Description of Unknown: uncultivated organism sequence
  REGION 1..1235: note = Category: MG78 effectors
  REGION 1..1235: note = Description: MG78-3 effector
MKKRIADEFINLYPVSKTLRFELKPIGRTLEYVERDGIIETDVARSQNYTEVKALIDEYHKAFIQKVLENTELSGLEGYMNLYSNAHRADREEKEFEACQSDLRKQISKSFKQDPAFATIDKKELIKNDLISFYEGDQEKQALIESFSEFTTYFKGFHENRQNMYVDEAKSTSIAYRVVNQNLPKYCDNIKVFQLISETTISVSVAELEEKLNAKYSDFGKIGDYFTIDGFNKVISQKGIDRYNVILGGYTTKDGEKIQGLNEFVNLYNQKYKEHLPKFKLLFKQILSDRDSASFIPDQFESDQQVFEDIEKIYQRIKEELLENEEEITISELFSDLSAYDLGGIYVKNDGSLTAISQELYGDWSVIKSAINSDYENNTPIKRTKREKYEETKKKELEKVKSYSILSLNSFMSNIHKEANVEKYFTNKVTDALDRVAKEYRIFNGIKTGKYENGKSLKSNDSDIAKIKGLLDSLKELQFSVKPLIAGTDEAGKDEVFYGEFLRIWECLDIITPLYSKVRNYVTSKPYSTEKVKLNFGKSTLLDGWDKNKEQDNLGVVFLKDGNYYLGIMNRRDTGCIDSAPIANSDHVYKKMNYKLLPGPNKMFPKVFFSKSRIDEFAPSEELLSNYRKGTYKKGDNFSLEDCHDLIDFFKQSILKHEDWSQFNFKFSDTKDYENISEFYKEVADQGYKINFNDIDESYINKLIDEGSLYLFQIYNKDFSKYSKGMPNLHTLYWKALFMPVNLKNVVFKLNGEAEVFFRKASIRQQDIISHAAGQKIKNKDPLNEKTESLFEYDIVKDRRFTCDKFMFHVPITINFKAAGERYMNLRVNNMIHNADEMHIIGIDRGERNLLYTCVIDLNGNIVEQMSLNEILSYDKNNNLHRRDYQRMLTEREKENISARQNWTTINTIKELKEGYLSQVIHVITNLMIKYNAIIVLEDLNFGFKRGRQKFERQVYQKFEKMLIDKLNLYVDKQKAVDENGGLLNAYQLTAKFESFQKLGKQSGFLYYVPAWNTSKIDPTTGFTNLFYTRYESVEKTKMFIQNMDRIWYDESTAAYAFSFDYNRFTYKAEGTKTEWTIYTNGRRIERFRNPEKNSEWDVKSVDLTAAFDELMTEYSISKDTEDLRNTILEIQEADFFKRFMKLISLTVQMRNSDEKNGVDEIISPVKNARGEFFVSSGTEKYLPVDADANGAYNIAKKGLWIIQKIKETPEDEMAKLKLTMSNKEWLKFAQENTL

SEQ ID NO: 1716 - protein, 1245 aa, unidentified
  REGION 1..1245: note = Description of Unknown: uncultivated organism sequence
  REGION 1..1245: note = Category: MG78 effectors
  REGION 1..1245: note = Description: MG78-4 effector
MNQEKGNLLSEFTNLYPVSKTLRFELKPVGRTQEHIEYDGILDADFQRAEDYKKVKKIIDRYHKEFIEISLRNVFLTKEDLNTYKELYETNAAARDEKWEKHFNKAKESLRKQIERCFKDAPAYKNLFKKELVQKDLIEFVKGSEEETKLVQGFKDFTTYFQGFYENRKNMYSAEDKSTAIAYRLIHQNLPKFIDNMHIFQKVEQSPIKDQLNTMFYELKAKIDIASISDYFALEGFSKVLTQSGIDVYNTILGGYAEGNVKVQGLNERINLYNQQLSKEEKKQLSIPKLKPLFKQILSDRESISFIPEQFADDQELLDAISEFYRNIQQTIFENEELITISQLFGQSDSYNWNRIYVKNDAFITTMSKQYLGDWSIVTRALEMDYDLAHASKKKGAKYEEKRGKELKRVKYYAVQKLNQIVMQYYGQECQIQQWMNQQIQETLQMIYENYDAASALLNTTYVTKKSLCNNQQAIGQIKLLLDSLKQLQNLIKPIANTQNETDKDELFYSELIRIWNELDPLTLLYNRVRNYVTKKPYSLEKVKLNFNKSTLLNGWDKNKERDNLGIILRKDGLYYLGIINPKCTNVIEKAPEATESTCYEKMEYKLLPGANKMLPKVFFAEKNIEEFNPSEEILAIREDESFKKGNNFSLENCHKLIDFYKQSISKHKDWSKFGFEFTSTSEYQDISGFYREVENQGYKISFRDIDVSYIDELVEQGQLYLFQIYNKDFSPYSKGTPNLHTLYWKALFSPENLSNVVYKLNGEAEVFYRKASIAETDKVVHKANEPVKNKDVHTEKETSVFEYDLVKDKRYTVDKYQFHVPITMNFQAQGENYMNRKVNQMIHDNKGIHVIGIDRGERNLLYLTLVDPEGRIIKQMSLNEIISYDKQNRKHVKNYHDLLDVREKENKSDRQNWKTVNTIKELKEGYLSQVIHVITKLMVEYNAIVVLEDLNSGFMRGRQKFEKQVYQKFEKMLIDKLNYCVDKTINPEQSGGLLHAYQLTKRFDSFKKLGKQSGFLFYIPAWNTSKMDPTTGFVNLFYVKYESVDKTKEFIKKFDSISYNSERSYFEFAFDYSKFTYKADGTRLHWTICTHGERIENFRNPEKNNEWDSRKITLTTAWKKLLEKFEIDYTQKNLIDQMLQCNDTEFFKTFMRYFRLILQMRNSDAKTGEDWICSPVMNEHGKFYFSGEESTLPLDADANGAYNIARKGLWVIEQIQSAQLDKLDKIKLAISNKEWLKYAQEHTL

SEQ ID NO: 1717 - protein, 1208 aa, unidentified
  REGION 1..1208: note = Description of Unknown: uncultivated organism sequence
  REGION 1..1208: note = Category: MG78 effectors
  REGION 1..1208: note = Description: MG78-5 effector
MKDEHRAESYKKVKKIIDRYHQQFIDNVLDNIALEGLNEYQEYYCIKNRNEQQEKQFENIKKKIRKQISDAFTGNPKFKCIFSKDMIENELLEYTKDNTDEQELIYEFDKFTTYFQGFYDNRKNMYSCDGKSTEVAYRIVDQNLPKYIDNISIYKTALSAGLDKQISDAINKIKTYYNIPLSEQLFDVNGFNNVLSQKGISIYNYIIGGFSDKERSKIQGINEIINIYNQHVDKKDGKKIPKCKQLFKQILSDREDAPFIIEQFESDEEVFSAIDNFYCEMNVSIFNNVDSINVQQLLSGINNYNLSGIFIKNGLAITDISKNLFSDWSIINHALEMNYDKNNNTKNKQTEAYIEKRKKVIKKQKAYSIEFLNNVVTEYTDKEVHIEKYYVDKFNNEDNLVNKIIEQKRHYDELLATSRKKPLRKNDVLIENIKQLLDLFNELQRLIQPLINYDESAKDPLFYSEIERIWNILDLLTPLYNKVRNYITKKPYSIEKSKINFNSPTLLKGWDKNKEETNLAIIFEKNGLFYLGVIDKNNNKVITKAPKAKSNNVYKKMIYKQIPNPSRDFPHVFLAKGNIDYYKPDNELLKKYEQKTHLKNNPNFCLEDCHKLIDFFKQSIKKNEDWAKFNFVFSDTKTYKDLSDFYREVDAQRYKITFENIDEDYINQLVSEGKLYLFQIYNKDFSEYSKGKPNLHTLYWKMLFAPENLENVVYKLNGEAEIFYRRASIKQDEIIKHPANEPINNKNELNKKAKSVFEYDLIKDKRYTIDKYQFHVPITMNFGAQGDNHFNLSVNKAIKYADDVNVIGIDRGERNLLYLVVINSKGEIIKQKSLNEIITVNNNKTEFHTDYHILLDKREKENVSARQNWKTINTIKELKEGYLSQVIHVITEWMLEYNAIVVLEDLNFGFKRGRQKFEKQVYQKFEKMLIDKLNYIVDKNKDIYESAGLLNALQLTNKFETFKTLGKQSGFLYYVPAWLTSKIDSTTGFANLFNNNDIRYSSVEASKEFFSKFISITYNPLGIHGSDYFEFSFDYNDFTYRAADTQTHWTVCSYGERIHHFRNQEKNNEWDTQYVDLTKSMKNLFDNYNINYQNVDIKEDILKISEKAFFKELLWLFSLILQMRNSDSDNNVDRLISPVLNDKNEFFDTGLKIEEYPIDADANGAYNIARKGLWVINQIKLCDDDKLNKLKLAMSNKEWLQFAQENRL

SEQ ID NO: 1718 - protein, 1299 aa, unidentified
  REGION 1..1299: note = Description of Unknown: uncultivated organism sequence
  REGION 1..1299: note = Category: MG79 effectors
  REGION 1..1299: note = Description: MG79-1 effector
MNNLSQFTNLYLVSKTLRFELKPIGKTLENIEKDGIISEDEKRAENYKKVKIIIDKYHKWFIEKSLSCVKLPEEKLNIYYNLYKATPDVKKEEKWNKEFEDIKKELRKEITNSFSSDEVKDLYKDLGKKELIRDILPEWKELDEEEKQLFGDFYQFTTYFVGFNENRKNMYSSEEKSTAISYRIINDNLPKFIDNIETFKIIKKTEFYSLFNNIYSELEPWLNISSIDEIFELTYLNEVLSQSQIEEYNFIIGGRSGEDRNDKIRGLNQYINEYNQKHEKKDRLPKFKMLYKQILSDREKISFLPESFENVNDLFVSVETYYKSNLLCVKNENNEEINIFDELSKLMSEISSYDLSKIYIKNDKNITDISQKLFGNYGVITSSINYYYESFINPNYKDDYARAKTESKRDRIEKDKEKYTKQKYLSLLEIQEAIKKYLEYTNEYSDSVVSYDKCLINYFSKIFDEKDKTNKIKDVYDKYTLLEPVLNVSYPETKKLSKNEKKLLKDFLDAILEIEHLVKPIYITSDEYSENDLTFYSQFNELYSHLDLLISLYNKVRSFVTKKPYSTEKIKLNFNSPTLLNGWDKNKEQDNLGIILIKNEKYYLGIISHKNRFIIDDFCTDASMENGYKKVVYRQIADASKDLPNLIEVNEKTIRKTGRKNDKGVNVILEEFKETYLPKKINQIRKSESYKISSKNFSKEDLTAYIDYYMQRIIAYKSDFTFIFKKPEEYNSYTEFIKDIDRQKYYLSYEYISYEDIKSLVDTGKLYLFQIYNKDFSASSKGKKNLHTMYWKALFDEKNLKDIVYKLNGQAEIFYRKASIPQESIVRHQKGDEMEFKNPLRNGNGERFKYEIVKDRRYTVDKFQFHVPITMNFKSPGDFKINSEVRKYIRNNPDVNILGVDRGERNLIYISLIDQKGNVIFDEDGKPIQYSLNTIESKYKKGDETVTFKTPYHTLLDEREKSRKQARQQWDDIEGIKELKDGYISQVVSLVTRLMVKYNAILVMEDLNFGFKKGRIRVEKQVYQKFEKMLIDKLNYLVFKDSKPGEVGELYNALQLTNKFTSFSSLGKQTGFIFYVPAWDTSKIDPVTGFVNLFPRCNTVKERQEFFNKFDFIKFDGENFVFSFDYDNFTSRATETKTKWTISTQGGERYFWNNRADNGKGATEKINVTEAMKKSLSEAGIQLEKDMDLKEKISSLDGKYIGKIYRLFNIVLAMRYSKDEEDFILSPVADENGKFFDSRNAANNLPKDADANGAYNIARKGLWYIMQLNDASGDLMKTNLAITNKEWLSFAQNKPYLDN

SEQ ID NO: 1719 - protein, 1230 aa, unidentified
  REGION 1..1230: note = Description of Unknown: uncultivated organism sequence
  REGION 1..1230: note = Category: MG79 effectors
  REGION 1..1230: note = Description: MG79-2 effector
MKDFNQFTNLYQQSKTLRFELKPVGDTLTHIQKNGILDRDYARAENYRKMKKTIDEYHKDFIDRALRGTNLDGLDAFAKLYAASVEEKRTEKWKKEYASCKQALRKEIAECFKRQAGFSDLDRKELIRNRLKAWIDQNQSDLFYTEEFYEFTTYFTGYNQNRMNMYSDEEKATAISHRLVDENLPKFLDNAAAFRKLKDSPVADHFSQLCADMEPWLNRSSLDDVFSVPHFNSVLTQAEIDAYNVLLGGRREEDRKLRGLNEYINLYNQKHPDAKLPRMKMLYKQILSDRESISWLPMEFRNAVELLEAVSGYSREAVDTVARAESALLELPNCDLTHVYVRGDALGAISSKLFGVYYVLSDALGLEDREDYYSMAELQTALDGYAKTVDRSVIPNADALVPDCLIAYFKNGLLQLAKDLHEALDKATPLLQIQQPEDYSLSQSDKSQLKSFLDAAMEILHFLKPLYLPADSELEKDDVFYGAFAPVYEDLQPITKLYDMVRNFATKKPYSTEKVKLNFDCSTLLDGWDTNKETQNLGVLFLRDGCYYLGIMDKRHNRVMEKAEGSQEEECYQKVQYKLLPGANKMFPKVFFSKSRINEFAPNEEIMRIYKSGSYKKGANFSLKDCHTLVDFYKASIQKHPEWKQFEFRFSPTESYQDINGFFQEVDKQGYRLTYTPVSAAYIDALVREGKLYLFQIYNKDFSPYSKGRPNLHTMYWKALFSEENLRDVVYKLNGKAEVFYRKRSISDANLVIHPAGQPIAKKNPMLSGQSSCFTYGITKDRRYTVDKFQFHVPITMNFKASGAVPINEVNKKVCAYIKNNPDVNIIGIDRGERHLLYISLIDRNGRVVKDENGCDIQYSLNTVTGSYRSSDGRPVGFETPYHDLLDQKEHERQAARQNWDTVENIKELKEGYLSQIVYHIAKMMVRYHAIVVLEDLNSGFKRGRIKVEKQVYQNFEKALIEKLNYLVFKDAEEGQPGDLYHALQLTEKFESFKKLTKQSGFLFYVPAWNTSKIDPVTGFADLLKPRYTNVNDAKAFFNKFKRISYDARNDWFCFSFDYRDFTQKAGESRAEWELCTFGAERYAFNRNLNGSRGGYEKWNLTERLKKLFEDYGIDFRRENLENAITMQTKAPFFSSLIKILQVLLAMRYSSAEDGRDFILSPVMGPDGSFFCSENLTPGLPADADANGAFNIARKGLWVLQQIDRAEKYTDWTTKVQNTQWLSFVQQLTP

SEQ ID NO: 1720 - protein, 1332 aa, unidentified
  REGION 1..1332: note = Description of Unknown: uncultivated organism sequence
  REGION 1..1332: note = Category: MG79 effectors
  REGION 1..1332: note = Description: MG79-3 effector
MREKNSGLEQFTNLYSLSKTLRFELIPVEGTAEAIQQNGILAEDKKLADSYQKIKPTLDAFHRAFIDRCLSEVKLENLDRYYDLYHVGDEEKRTKKYQDEFKSVKNALRKEVVSYFKKDKRYPKGLFGKELLKTHLPKWIEETGEDWYQDESFVNFTTYFSGYNENRENMYKDKEQSTSIAYRMIDENLPKFVYNMRLFNRLSDTDISGSFSVISEELAPFIFTSSLEEMFELSTFNKLMTQDHIDALNTIIGGYKEGEKVVKGLNGYINEYNQAHPKNRLPMMQMLYKQILSESNSASWLPDAFDSAAELFSGMNNFCDCGLRMNENPSLLEEMKKVLQEIKACDAAGIYIRNDSSINTISNAIFGHYGVIRNALETYYECQVFPEYRKRLISAKSAKSAEKIKKAKETYVTGTGYFSVREIQDALELYIDTAELGSNPEIKNRYFKDCISVYLAEGSATYVSRIKEAYNNVSGMIKASYASDYRLNEDDKDGLKHFLDAVLSLLHYCKPLYVKAEAGIKVDEVFYGQFNPLYEQLQTVTVIYDKVRNYATQKPYSEEKIKLNFGIKGNFLSGWVESKTDASDNGTQYGGYLFRKRNYIGEYDYYLGISSNSKLFRYFNSISAEEASKYERLNYYQPKEQSVYGSAYKGRHSYADDKALLMSTILDFMKKTKDTEFYEGFLAYSQTDLATPSGCLSRIKEFSTELYENLLRDEKFKDANEEVMQALKATIHSMGRLKGTEAVTERQYGVFTEMMNDINTLMSNNVYQYSAVSETELREALQDKKKPLYLFRITNKDLAYAERLEQGKDRKHRGRDNLHTMYFKALMSGEQNVYDIGSGTVFYRPASIARKVTHPAGIPINSKNPNLKDHKNIFEYDLIKDRRFTEDKFQFHLSIIQNYSASGIKSSDYNEKVCQYLRNNPNVNILGIDRGERNLLYISMIDRNGNIVRDENGQLIQYSLNNLTGEYTNASGEIVKFTTPYHTLLDRREKDNADNQRSWGTIGKIKDLKAGYMSQVISHITRLMVKYNAIIVMEDLNSRFINSRRKVDKQVYQNFERALIEKLNYLVFKDIPVEESGGLYNALQLADRFTSFRDLQKQSGFIFYIPAWNTSRIDPVTGFVNLLKPKSDNLKQARDFFGKYESICFNSKSDWFEFAFDYSNFLSGADYLKSRWTVCTHGDCRYIYDKKMNNNKGGYKKINVTKTIKELFNEYGIDYAEGDDLKEQIVSQNRTAFFSKLIECLKVTLAMRYSNGDGGRDFILSPVADENGHFFNSEEAAANRDDLPWDADANGAYNIARKGLLVLRNIDKSDSVKDWTTKISNREWLEFAQSFN

SEQ ID NO: 1721 - protein, 1227 aa, unidentified
  REGION 1..1227: note = Description of Unknown: uncultivated organism sequence
  REGION 1..1227: note = Category: MG79 effectors
  REGION 1..1227: note = Description: MG79-4 effector
MNDLSLFTNLYPKSKTLRFELKPVGETLENIQRSGIIERDTARAESYRKMKKTIDAFHKSFIDRALTKANLTKLDEFDALYRASADEKRTDEWKKAFDSCKQALRKEIVAYFIIQEDFSDLNKKELIRNRLKTWIDQNHSDLYFTEEFRDFTTYFTGYNENRMNMYSDQEKATAVSHRLIDENLPKFLDNIAVYNKVKASPVAERFAQVCTDMEPWLNVASLDDVFSVSYYNCTLTQLQIDAYNVLLGGWRNGDQKRQGLNEYINLYNQTHPDAKLPQMKMLYKQILSDRESISWLPAEFENASELLDVVQAFSESLKSPVENAGRILWELPGCDKSKVYVRGDALGKISAGLFGAYHVISDALGEEERVDYYALDTLQSALLAYAETTDHEMIPNGEAIKPDCISQYYVQGIQALSDALNASYSDVADLLNTAHTAEYRLSQTDKAKLKAYLDAAMEILHFLKPLYLPSDFELEKDEVFYGAFAPVYEELQPMTKLYDMVRNYATKKPFSTEKVKLNFDCSTLLDGWDVNRETQNLGVLFLRGGNYYLGIMDKRNNRILEQVEASSEEGCYQKVQYKLLPGPNKMLPKVFFSKSRIAEFAPSEEVLRIYKSGSFKKGSAFSREDCHTLIDFYKSSIQKHPEWSQFGFCFSPTETYEDISGFFREISEQGYKLSYLPVSSSYVDELVRDGKLYLFQIYNKDFSPYSKGRPNLHTMYWKALFSEENLRDVVYKLNGQAEVFYRKRSISDDDLVTHPANQPIAKKNPALAGQNSTFSYDIVKDRRYAVDKFQFHVPITMNFKAGGTARINEKVCAYLKNNPDVNIIGIDRGERHLLYVSMIDRNGRVVRDENGKYIQYSLNTITGCYRDSAGKQVAFETPYHDLLDQKERERQSARQNWDTVETIKELKEGYMSQVVHHIARLMVKYNAVVVMEDLNSGFKRSRIKVEKQVYQNFEKALIEKLNYLVFKDTPADHPGGLYHALQLTESFESFKKLTKQSGFLFYVPAWNTSKIDPVTGFVDLLKPKYTNAVAAKAFFSKFQGISFDPENDWFRFRFDYRDFTEKAGESRTEWELCTAGELRYAFNRKLNGNHGGYEQWNVTERLKTLFDRYGVDWRTGDLRKAITERTEAPFFAALVKNLQVLLAMRYSCAEDGKDFILSPVAGPDGAFFCSENGMPGLPQDADANGAYNIARKGLWVLRQIDRAESFNDWTTKVQNAQWLTFVQELTP

SEQ ID NO: 1722 - protein, 1233 aa, unidentified
  REGION 1..1233: note = Description of Unknown: uncultivated organism sequence
  REGION 1..1233: note = Category: MG79 effectors
  REGION 1..1233: note = Description: MG79-5 effector
MKDLSTFISQYDVSKTLRFELIPTPETEKHIREKGILDADEKLAVSYKRMKETMDEFHKDFIDRALSTAQLRHIDEYCALYWADAEEKNSKKYADRLKAASAELRKEIVQCFDADDAFKKIDKKEFIKDELETWINEKHPMLYYDPDFKKFTTYFEGYRKNRMNLYSDEEKVGSVAYRLIGENLPKFLDNIRIYEKVKASKVAGKFSKLCKDMEQYMNGRSLDEMFSARAYPSTLTQTQIDQYNTVIGGRNDGSSKLQGLNEYINLYNQQHPDAKLPIFKMLYKQLLSDRISASWLPEAFDSAQALFDGVEAFAQEVLTDTVLNDLQTVLNELPERDAALIYVRKSSVNDISSRLFGYYSVFNDALDAMGENEKTGYISLARLQSAVDGYIPTLDKDEYESIVSEYAPNCVTACFFDNLHEYIENISDAYEALRPCFGVEHDENYQLSEKERTWLKAYLDGVIALLHFIKPLYIDKDFALEKDEVFYSDFMPLYEKLSQVTKLYDKVRSFASKKPYSTKKIKLNFGCSTLLSGWDVNKETQNLGVLLIKDGNYYLGIMDKANNKLFSDAPECQSEDCYQKVVYKLLQEPYKMLPKVFFSKSRINEFAPSEEIISIRINETFKKGPKFIAADCHKLVDFYKTSISKHPDWRRFEFKFSPTGTYVDINDFYQEVAEQGYKLFFKPVSTAYIDSAVSEGKLYLFRIYNKDFSPSAKGKPNLHTMYWKALFDEKNLADVVYKLSGHGEVFYRSRSIDDEKRVIHPANKPIDKRNSGMSGETSVFDYDIIKDRRYTVDKFQFHVPISLNFKAHGVSNFNEKVCTYLKNNPDVNIIGIDRGERNLLYISMIDRSGRVVKDSRGNYIQYSLNTITGEYKNADGAPVKFSTPYHELLDKKEKNRREARENWGDIESIKELKAGYMSQVVYHISRLMVEYNAIVVMEDLNSGFKNGRKKVEKQVYQNFEKALIEKLNYLVFKDYPVDTCGGLYRALQLTDKFKSFGMLTKQTGFLFYVPAWNTSKIDPVTGFVDMLKPKYKSIPDARVFFSKFNYIRYNDQKDWFEFSFDYGNFTDRADGTKTDWTLCTYGSLRYAYNKSLNNGHGGYEKWNVTDKLKALFSANGIEYADGKDLKTKITAQNKADFYAILVKCLQVTLAMRYSSVEDGKDFILSPVADENGVFFCSEGRNDGLPQDADANGAYNIARKGLCVLEHIDVAEKYSDWSTKISNKEWLNFVQTRA

SEQ ID NO: 1723 - protein, 1316 aa, unidentified
  REGION 1..1316: note = Description of Unknown: uncultivated organism sequence
  REGION 1..1316: note = Category: MG80 effectors
  REGION 1..1316: note = Description: MG80-1 effector
MSRATGGGGAFESLMNMLKRRRIWGMGIFDKFVRQYSLSKTLRFELKPVGKTLENMRNHLGFDEKLQTFFADQEIKDAYMTLKPIFDSIHEKFITESLASSVAKKINFLEYFKKYKNRKELGEKEFQNIEKQLRTKFNDAYIEAAESLRKKAGKDEKGKYVLRDASYKVLTEQGILKYIAKNTVEFGNIESREKIDHALKAFEGFFTYFGGFNQNRENYYETGKEASTAVATRVVHENLPKFCDNVLFFEAHTDGYKQIHGYLKKKGRNLVNKKGVTLFPIAKDVFEISYFSKCLSQNEIETYNDAIGNANFLINLYNQALSEGKKSLPLPFFKTLFKQIGCGKRDALFFTITHDTKADANKARVKKAEAFSVEEVLELAAGAGEKYFSGTSDDGMINTVPEFLEHLRHRTDYRGIYWKRAAVNTVAGKYFAGWVDIKEHLLKEKVFHKNSGSGEIVVPEVVELNGLFKALSKVENWKNILFKPSIIKEKDQGKIIERSQYVSQAVLGLVERDIELRKSEFLAGSFAVLSSKRYKKPNEIEKIKSWMDGGLAVIQMLKYFDVRENKAKGDPIDSMLSEGLNNLVRAKDAPWFMWYDGLRNYLTRKPQEGTKDNKLKLNFENSTLGDGWDVNKEPDNYCVLLQDSNKHYFLAVITRQKDIKGYNKIFVKDEQNELFSTRGSNEWKKIEYKLLPGPNKMLPKCLLPGNNRTKYGATETVLDIYDKGGFKKNESSFSPSSLGKIIDFYKEALKKYEDWRCFNFSFKETASYKDISQFYLDVERQGYKLDMIDINKSVLDHWVDEGMIYLFAINNQDYNRGKRVGHKNNLQTTYWNAIFKILENRPKLNGGAEIFYRRALASDQLEKVSDKDSNLKHFRFSKEKFMFHVPITLNPTLKNPRMNNLINDTLKKQKDVNFLGIDRGEKHLAYYSLIDRNGNIKEQGTLNMPFLDKQGKQRIIKADKRTIGEDEKEQIKIVDCKDYNDLLDARAGDRDYARLNWQAIRTIKELKDGYISQVVRKICDLAIQHNALIILEDLNTGFKRGRQKIEKSVYQKLELALAKKLNFLVDKNAKIGELGSVTNALQLTPLISNFGDIENRKQVGIMLYVRANYTSQTDPITGWRRSIYLKNGSEKSIKEQILKYFTDFGFKDDDYYFTYKDENKNWTLFSGTKGKGLDRFRRRMGLKKDTWTIEKQDIVKILDEVFIGFDKERSFYSQIKAGKELHGWGNLRFAIEMIQQIRNTGTTDADDDFIVSPVRDATGNHFDSRRAKKNQPDSGDANGAYNIARKGIMMLDRIASDENPYIRDSEWDAWLSKNSR

SEQ ID NO: 1724 - protein, 741 aa, unidentified
  REGION 1..741: note = Description of Unknown: uncultivated organism sequence
  REGION 1..741: note = Category: MG81 effectors
  REGION 1..741: note = Description: MG81-1 effector
MPIISPGNQESNADGAIELRIAADIDETTGCTFSATGLPDGLEFERKKFEDDEEHTWQTGRIIGTPKRAGIYQVTVTAIDKAGTKTTASFVWTVCAMRAYRFALDLSDPQITAMQQHAGTARWAYNKALEAKVNAHRAYTERLKALLASGLTPQQAKAQMKKESAALKAQTAIWEHHRQCLTAMNLGRALPAKTPRGPQELIDDLAAIRAMVPDGVDPALLTLVGNWKGQPPTALCWARDRHEARQKWIKTHLVMARQTVTHLKQQLFDLGDTIPNMIENLANWRNTRDLPKEEGGSPWWQEVSSYVFSGGMGRADAAWSNWLKSLSGQRAGKAVGYPRFKKRGQCADSFPLFHDVTNPSIRIEGYRHLRLPNIGEVRVHNSGHRSGTRNRVTATNAKGVKRTVSGQSKGRLGSTKRLVRMIERGDAIVQSVTVVRGGHRWYANVLVKLTPEAMRQREMVARAHQKVSKKRAQGRGNVGVEWGVRTLATLSNGESFANPKPGKKNQRRLRVASQKVSRKPHKRGQPISANRAAAIRQLGRVHHEIAETRKGNHHQISAAISLGYRGVAVRGLDVKSMTKSAKGTVEKPGKHVKVKSTFNRAALDAAPGMLQNQISYKTTQYGAKFGVAPKDLPSSQTCSACGWRDPSIPLTQMTFRCGNVECGKKIDREVNAARNIRNSVFPVASDSGDTLNACVDGIGPPGSRGQPSPKQEDPEPHPPPEDGPAEGHSGEAIPRRSHTPG

SEQ ID NO: 1725 - protein, 607 aa, unidentified
  REGION 1..607: note = Description of Unknown: uncultivated organism sequence
  REGION 1..607: note = Category: MG81 effectors
  REGION 1..607: note = Description: MG81-3 effector
MPTEPRLIQKAYKFALDPTPTQARAFASHAGGARFAYNWGISTYAAALDARKAQTDAGQDPTVDVPNHFALCKAWTQYKDTYRLTGDPDGRPVHWVEDNFVGTYQAALRDAHGAWQKMWDSRNGQRKGRAVGRPRFKKKGRSPDSFQMHGDSLRLDSGRALRPADATARKPLNRAERAKLAPTPGMTPTERSAAQKRLRAGRKARAGHVHGPQVSQSGTIYVNLPKVGPVRVPGRVRIPQVTPSVAGWVDRNSRTARKLLRQLAKAATTGPVVCPTCAGTGTVTVTTKKGERRDTKCGKYHPTVRPEDKLPGCQGKGKVEPARIVRATISRGASGTWWCSITTEQVITVPVITTRRPAHPTRRQLADGSIGVDLGVKYLAVLSTGDTYMNSRFLDSALTDLKRMQKVLSRTAKDSHRRLKARRRVGTLHEQVALMRRDATNRVTTELARKYATISVEGWDAQRLAELGSKDLPKRLRRNRNRALADAAPGMLRWQLEYKTSWYGSTLFKGEPHWETGRICSVCGTARTKPVPLAEEQFRCPQGHVLPRRVNSARVMDRVARGLVAAPATPEPRGGDVRPATPRRGGPSPAKRVARSRKRGKTGTPDP

SEQ ID NO: 1726 - protein, 632 aa, unidentified
  REGION 1..632: note = Description of Unknown: uncultivated organism sequence
  REGION 1..632: note = Category: MG81 effectors
  REGION 1..632: note = Description: MG81-4 effector
MTTETVMQQLAFKVALDPTPRQARAMGSHAGGARFAYNWGIARIAEALKQREAERQAGGEPTTPVPDHFALCKLWTQWKDTAEWVDRATGEVTRGVPWVAENFVGTYQAALRDAARAWANYFDSRTGQRAGRAIGKPRFKSKRTARKSFQVHGSSLRLVSAVKVNLPKIGTVTVMSDDSRHPAMARSRRRVPGQRHMGNRRRSRQLWQRLRHGQALAERAAEILSAAYADGNPDRVLEHLTALADERARARAVAAAEERLQKAKAAAAKAKPEKREKAQQRVAQAEEALRRAQAITANRKDGWSARKLAEVCRTGLITPVQAADLAEVFGLGEQQRAALAEAALQPRLVKATVTLGADGLWWLSLSAEVPVRVRTSPSRRQRERGATGLDLGVRNVVTSSKRLGGDQNLPNPRYLEQALVELRAAQKHLSRCTPGSARHAKAKARVGLIHADVARLREQHHHRLSTRLVRTFAGIAVEGYDLQELARRGSEGLPGEVRRRRNRALADTGAGMLRQQLQYKTARYGSHLVVAEPDAPTGRTCATCGQAKAKPVPPYHEVFACEACGRTRPRRLNTALALEAVAASSGSPHGGSDQPRGEDVRPAASRRGGQSSMKRAARSRPPGRGQTGTPGP

SEQ ID NO: 1727 - protein, 545 aa, unidentified
  REGION 1..545: note = Description of Unknown: uncultivated organism sequence
  REGION 1..545: note = Category: MG81 effectors
  REGION 1..545: note = Description: MG81-5 effector
MATTDKKDKDREKLRAYKFRLDPNQAQTTALYQAVGAARYTYNMLTAYNSEVNRLRDDYWKKRHDEGISDADIKKELKALAKEDKRYKQLKYGAFSTQYLTPERDRHKDAALRIKNGEDPSVVWNQETERSANPWLHTVNRRVLVSGLQNASDAWDNFWDSRMGKRAGRLVGTPRFKKKGVSRDSFTVPAAKEKEKMGAYGAAYLRGEPAYKQGRRKITDYRHVRLSYLGTIRTFNSTKPLVKAVAAGAKIRSYTVSRNADRWYVSFLVKFSEPIRRSATKRARAAGSVGVDLGVKYLASLSDSEAPQRFPNLKFVEGLPSLENPRWSGTSSRRLRKLQRALARSQKGSNRRSRLVKQIARLHHMTALRRESNLHQLTKKLATGYTLVGFEDLNVSGMTASAKGTVENPGKNVAQKSGLNRVVLDAAFGVFRNQLEYKAVWYGSAFEKVNRYFASSQTCSECGRKAKTKLTLRDRVFDCVYCGNMMDRDFNAAVNICREAQRLFDEKLASEDGESLNGRGSRGALRGAKTVEASRPPASHRRGSP

SEQ ID NO: 1728 - protein, 512 aa, unidentified
  REGION 1..512: note = Description of Unknown: uncultivated organism sequence
  REGION 1..512: note = Category: MG81 effectors
  REGION 1..512: note = Description: MG81-6 effector
MPTKQKEDSNRCVLTLPLLTEPWQEHIIEKRFKIIEHLKNQLISIELRKLKKLQRTKAYKNLIKQIESVPKSERTALYKERNKMLKDAGFSQYTFMDDMAGKKSLMQKHFESHINVQIAHKAAIDVWSSFEKFLFGTGQIVHYQKRGTLSSVASKSPKTGMFYYSDENIFKWSGGGTKPKGGIILCLRVASVKTNYEKEMVANNEIKYYRVVRKWMKTKYKYYLQITFAGKPADKHREISTGRVGIDIGTQTIAIASDKSVKLLELADKVNKNHIKKCELQRKLDRSRRYTNPDNFNPDGTVKRGTKGHKLKWNKSKHYIEIAGKIRELERKNADIRKYQHTCLANDILAMGNQIYIEPMNYKGLQKRAKETQVDEKGRYKKKKRFGKSLANKAPAMFVTILKTKAEQHGGEVYEVDIMSYRASQCDHTTGEYTKHGLNDRWRILGNGDKVQRDLYSAFLIKNSNKTHDEIDLDKCSKTYDNFKKLHDTEIENIRNEVKLRERKNISSYGIA

SEQ ID NO: 1729 - protein, 512 aa, unidentified
  REGION 1..512: note = Description of Unknown: uncultivated organism sequence
  REGION 1..512: note = Category: MG81 effectors
  REGION 1..512: note = Description: MG81-7 effector
MPAKQKEGGNRCVLTLPLLTELWQEHIIEKRFKIIEHLKNQLISIELRKLKNLQRTKAYKNLIKQIESVPKSERTVLYKERNKMLKDAGFSQYTFMDDMAGKKSLMQKHFESHINVQIAHKAAIDVWSSFEKFLFGTGQIVHYQKRGTLSSVASKSPKTGMFYYSDENIFKWSGGGTKPKGGIILCLRVASVKTNYEKEMVANNEIKYYRVVRKWMKTKYKYYLQITFAGKPADKHREISTGRVGIDIGTQTIAIASDKSVKLLELADKVNKNHIKKCELQRKLDRSRRYTNPDNFNPDGTVKRGTKGHKLKWNKSKHYLEIAGKIRELERKNADIRKYQHTCLANDILAMGNQIYIEPMNYKGLQKRVKETQVDEKGRYKKKKRFGKSLANKAPAMFVTILKTKAEQHGGEVYEVDIMSYRASQCDHTTGEYTKHGLNDRWRILGNGDKVQRDLYSAFLIKNSNKTHDEIDLDKCSKTYDNFKKLHDKEIENIRNEVILRKRRNISSYGIA

SEQ ID NO: 1730 - protein, 512 aa, unidentified
  REGION 1..512: note = Description of Unknown: uncultivated organism sequence
  REGION 1..512: note = Category: MG81 effectors
  REGION 1..512: note = Description: MG81-8 effector
MPTKQKEDSNRCVLTLPLLTEPWQEHIIEKRFKIIEHLKNQLISIELRKLKKLQRTKAYKNLIKQIESVPKSERTALYKERNKMLKDAGFSQYTFMDDMAGKKSLMQKHFESHINVQIAHKAAIDVWSSFEKFLFGTGQMIHYQKRGTLSSVASKSPKTGMFYYSDENIFKWSGGGTKPKGGIILCLRVASVKTNYEKEMVANNEIKYYRVVRKWMKTKYKYYLQITFAGKPADKHREISTGRVGIDIGTQTIAIASDKSVKLLELADKINKNHIKKCELQRKLDRSRRYTNPDNFNPDGTVKRGTKGHKLKWNKSKHYIEIAGKIRELERKNADIRKYQHTCLANDILAMGNQIYIEPMNYKGLQKRAKETQVDEKGRYKKKKRFGKSLANKAPAMFVTILKTKAEQHGGEVYEVDIMSYRASQCDHTTGEYTKHGLNDRWRILGNGDKVQRDLYSAFLIKNSNKTHDEIDLDKCSKTYDSFKKLHDKEIENIRNEVKLRERKNISSYGIA

SEQ ID NO: 1731 - protein, 512 aa, unidentified
  REGION 1..512: note = Description of Unknown: uncultivated organism sequence
  REGION 1..512: note = Category: MG81 effectors
  REGION 1..512: note = Description: MG81-9 effector
MPTKQKEGGNRCVLTLPLLTEPWQEHIIEKRFKIIEHLKNQLISIELRKLKNLQRTKAYKNLIKQIESVPKSERTALYKERNKMLKDAGFSQYTFMDDMAGKKSLMQKHFESHINVQIAHKAAIDVWSSFEKFLFGSGQMIHYQKRGTLSSVASKSPKTGMFYYSDENIFKWSGGGTKPKGGIILCLRVASVKTNYEKEMVANNEIKYYRVVRKWMKTKYKYYLQITFAGKPADKHREISTGRVGIDIGTQTIAIASDKSVKLLELADKVNKNHIKKCELQRKLDRSRRYTNPDNFNPEGTVKRGTKGHKLKWNKSKHYIEIAGKIRELERKNADIRKYQHTCLANDILAMGNQIYIEPMNYKGLQKRAKETQVDEKGRYKKKKRFGKSLANKAPAMFVTILKTKVEQHGGEVYEVDIMSYRASQCDHTTGEYTKHGLNDRWRILGNGDKVQRDLYSAFLIKNSNKTHDEIDLDKCSKTYDNFKKLHDKEIENIRNEVKLRERKNISSYGIA

SEQ ID NO: 1732 - protein, 512 aa, unidentified
  REGION 1..512: note = Description of Unknown: uncultivated organism sequence
  REGION 1..512: note = Category: MG81 effectors
  REGION 1..512: note = Description: MG81-10 effector
MPTKQKEDSNRCVLTLPLLTEPWQEHIIEKRFKIIEHLKNQLISIELRKLKKLQRTKAYKNLIKQIESVPKSERTALYKERNKMLKDAGFSQYTFMDDMAGKKSLMQKHFESHINVQIAHKAAIDVWSSFEKFLFGTGQMIHYQKRGTLSSVASKSPKTGMFYYSDENIFKWSGGGTKPKGGIILCLRVASVKTNYEKEMVANNEIKYYRVVRKWMKTKYNYYLQITFAGKPADKHREISTGRVGIDIGTQTIAIASDKSVKLLELADKINKNHIKKCELQRKLDRSRRYTNPDNFNPDGTVKRGTKGHKLKWNKSKHYIEIAGKIRELERKNADIRKYQHTCLANDILAMGNQIYIEPMNYKGLQKRAKETQVDEKGRYKKKKRFGKSLANKAPAMFVTILKTKAEQHGGEVYEVDIMSYRASQCDHTTGEYTKHGLNDRWRILGNGDKVQRDLYSAFLIKNSNKTHDEIDLDKCSKTYDSFKKLHDKEIENIRNEVKLRERKNISSYGIA

SEQ ID NO: 1733 - protein, 512 aa, unidentified
  REGION 1..512: note = Description of Unknown: uncultivated organism sequence
  REGION 1..512: note = Category: MG81 effectors
  REGION 1..512: note = Description: MG81-11 effector
MPTKQKEDSNRCVLTLPLLTEPWQEHIIEKRFKIIEHLKNQLISIELRKLKNLPRTKAYKNLMKRIESVPKSERTALYKERNKMLKDAGFSQYTFMDDMAGKKSLMQKHFESHINVQIAHKAAIDVWSSFEKFLFGSGQMIHYQKRGTLSSVASKSPKTGMFYYPDENIFKWSGGGTKPKGGIILCLRVASVKTNYEKEMIANNEIKYYRVVRKWMKTKYKYYLQITFAGKPADKHREISTGRVGIDIGTQTIAIASDKSVKLLELADKVNKNHIKKCELQRKLDRSRRYTNPDNFNPDGTVKRGTKGHKLKWNKSKHYLEIAGKIRELERKNADIRKYQHTCLANDILAMGNQIYIEPMNYKGLQKRAKETQVDEKGRYKKKKRFGKSLANKAPAMFVTILKTKAEQHGGEVYEVDIMSYRASQCDHTTGEYTKHGLNDRWRILGNGDKVQRDLYSAFLIKNSNKTHDEIDLDKCSKTYDSFKKLHDKEIENIRNEVKLRERKNISSYGIA

SEQ ID NO: 1734 - protein, 512 aa, unidentified
  REGION 1..512: note = Description of Unknown: uncultivated organism sequence
  REGION 1..512: note = Category: MG81 effectors
  REGION 1..512: note = Description: MG81-12 effector
MPTKQKEDSNRCVLTLPLLTEPWQEHIIEKRFKIIEHLKNQLISIELRKLKNLQRTKAYKNLIKQIESVPKSERTVLYKERNKMLKDAGFSQYTFMDDMAGKKSLMQKHFESHINVQIAHKAAIDVWSSFEKFLFGTDQMIHYQKRGTLSSVASKSPKTGMFYYSDENIFKWSGGGTKPKGGIILCLRVASVKTNYEKEMVANNEIKYYRVVRKWMKTKYKYYLQITFAGKPADKHREISTGRVGIDIGTQTIAIASDKSVKLLELADKVNKNHIKKCELQRKLDRSRRYTNPDNFNPDGTVKRGTKGHKLKWNKSKHYLEIAGKIRELERKNADIRKYQHTCLANDILAMGNQIYIEPMNYKGLQKRAKETQVDEKGRYKKKKRFGKSLANKAPAMFVTILKTKVEQHGGEVYEVDIMSYRASQCDHTTGEYTKHGLNDRWRILGNGDKVQRDLYSAFLIKNSNKTHDEIDLDKCSKTYDSFKKLHDKEIENIRNEVKLRERRNISSYGIA

SEQ ID NO: 1735 - protein, 512 aa, unidentified
  REGION 1..512: note = Description of Unknown: uncultivated organism sequence
  REGION 1..512: note = Category: MG81 effectors
  REGION 1..512: note = Description: MG81-13 effector
MPTKQKEGGNRCVLTLPLLTEPWQEHIIEKRFKIIEHLKNQLISIELRKLKNLQRTKAYKNLIKQIESVPKSERTALYKERNKMLKDAGFSQYTFMDDMAGKKSLMQKHFESHINVQIAHKAAIDVWSSFEKFLFGSGQMIHYQKRGTLSSVASKSPKTGMFYYSDENIFKWSGGGTKPKGGIILCLRVASVKTNYEKEMVANNEIKYYRVVRKWMKTKYKYYLQITFAGKPADKHREISTGRVGIDIGTQTIAIASDKSVKLLELADKVNKNHIKKCELQRKLDRSRRYTNPDNFNPDGTVKRGTKGHKLKWNKSKHYLEVAGKIRELERKNADIRKYQHTCLANDILAMGNQIYIEPMNYKGLQKRAKETQVDEKGRYKKKKRFGRSLANKAPAMFVTILKTKAEQHGGEVYEVDIMSYRASQCDHTTGEYTKHGLNDRWRILGNGDKVQRDLYSAFLIKNSNKTHDEIDLDKCSKTYDSFKKLHDKEIENIRNEVKLRERKNISSYGIA

SEQ ID NO: 1736 - protein, 531 aa, unidentified
  REGION 1..531: note = Description of Unknown: uncultivated organism sequence
  REGION 1..531: note = Category: MG81 effectors
  REGION 1..531: note = Description: MG81-14 effector
MILLAKNNNNNNNTDTCVLTLPLRVEKWQEDCLLKRFEAARRIYNSLLNFELKKLRQLERTVEYRQIQSVISSAYRSNTKDSPECKDAFKRREKLISANGISEYGFKSDVKFFYKHFDGLIGSNVAVHCIAVQLWAAFDKYLRGSGKEIHFKRLGDISSLKGYSVKGKSGGCEIIFRGQYIEWTRKKKKLLLPLKIDPDNEYEREMLSRRVKYVRIIKKPGKNRLRWYAQLTLEGKPALKYSAETGKPIHSVGKGNVGIDIGPQTVAYASDKEVALLELADRVTNIEHQKKKLQRKLDRSRRATNPDNYKPDGTIKRGVKLTRNKSKRYLKLQSKLAYIQHRQAEIRKLQHTCLANHMLTLGDRFFVEKMNWPGLAHRAKETSISEKTGRYKRKKRFGKSLANKAPAMFISILKRKCETLGLPGVVEVDTYSLKASQYNHLSDTYEKKSLSERWNYMPISDGSDSSKTKRIQRDLYSAFLLQHTIPQPCSFDKKALRIDYPNFVTMHDAEIHRLESLPKTITSMGVRRSHS

SEQ ID NO: 1737 - protein, 512 aa, unidentified
  REGION 1..512: note = Description of Unknown: uncultivated organism sequence
  REGION 1..512: note = Category: MG81 effectors
  REGION 1..512: note = Description: MG81-15 effector
MPTKQKEDINRCVLTLPLLTEPWQEHIIEKRFKIIEHLKNQLISIELRKIKNLQRTKAYKNLIKQIESVPKSERTALYKERNKMLKDAGFSQYTFMDDMAGKKSLMQKHFESHINVQIAHKAAIDVWSSFEKFLFGTGQIVHYQKRGTLSSVASKSPKTGMFYYSDENIFKWSGGGTKPKGGIILCLRVASVKTNYEKEMVANNEIKYYRVVRKWMKTKYKYYLQITFAGKPADKHREISTGRVGIDIGTQTIAIASDKSVKLLELADKVNKNHIKKCELQRKLDRSRRYTNPDNFNPDGTVKRGTKGHKLKWNKSKHYIEIAGKIRELERKNADIRKYQHTCLANDILAMGNQIYIEPMNYKGLQKRVKETQVDEKGRYKKKKRFGKSLANKAPAMFVTILKTKAEQHGGEVYEVDIMSYRASQCDHTTGEYTKHGLNDRWRILGNGDKVQRDLYSAFLIKNSNKTHDEIDLDKCSKTYDSFKKLHDKEIENIRNEVKLRERRNISSYGIA

SEQ ID NO: 1738 - protein, 512 aa, unidentified
  REGION 1..512: note = Description of Unknown: uncultivated organism sequence
  REGION 1..512: note = Category: MG81 effectors
  REGION 1..512: note = Description: MG81-16 effector
MPTKQKEGGNRCVLTLPLLTEPWQEHIIEKRFKIIEHLKNQLISIELRKLKNLQRTKAYKNLMKRIESVPKSERTALYKERNKMLKDAGFSQYTFMDDMAGKKSLMQKHFESHINVQIAHKAAIDVWSSFEKFLFGSGQMIHYQKRGTLSSVASKSPKTGMFYYSDENIFKWSGGGTKPKGGIILCLRVASVKTNYEKEMVANNEIKYYRVVRKWMKTKYKYYLQITFAGKPADKHREISTGRVGIDIGTQTIAIASDKSVKLLELADKVNKNHIKKCELQRKLDRSRRYTNPDNFNPDGTVKRGTKGHKLKWNKSKHYIEIAGKIRELERKNADIRKYQHTCLANDILTMGNQIYIEPMNYKGLQKRAKETQVDEKGRYKKKKRFGKSLANKAPAMFVTILKTKAEQHGGEVYEVDIMSYRASQCDHTTGEYTKHGLNDRWRILGNGDKVQRDLYSAFLIKNSNKTHDEIDLDKCSKTYDSFKKLHDKEIENIRNEVILRERRNISSYGIA

SEQ ID NO: 1739 - protein, 512 aa, unidentified
  REGION 1..512: note = Description of Unknown: uncultivated organism sequence
  REGION 1..512: note = Category: MG81 effectors
  REGION 1..512: note = Description: MG81-17 effector
MPTKQKEGGNRCVLTLPLLTEPWQEHIIEKRFKIIEHLKNQLISIELRKLKKLQRTKAYKNLIKQIESVPKSERTVLYKERNKMLKDAGFSQYTFMDDMAGKKSLMQKHFESHINVQIAHKAAIDVWSSFEKFLFGTGQIVHYQKRGTLSSVASKSPKTGMFYYSDENIFKWSGGGTKPKGGIILCLRVASVKTNYEKEMVANNEIKYYRVVRKWMKTKYKYYLQITFAGKPADKHREISTGRVGIDIGTQTIAIASDKSVKLLELADKVNKNHIKKCELQRKLDRSRRYTNPDNFNPDGTVKRGTKGHKLKWNKSKHYLEVAGKIRELERKNADIRKYQHTCLANDILAMGNQIYIEPMNYKGLQKRAKETQVDEKGRYKKKKRFGKSLANKAPAMFVTILKTKAEQHGGEVYEVDIMSYRASQCDHTTGEYTKHGLNDRWRILGNGDKVQRDLYSAFLIKNSNKTHDEIDLDKCSKTYDSFKKLHDKEIENIRNEVILRKRRNISSYGIA

SEQ ID NO: 1740 - protein, 530 aa, unidentified
  REGION 1..530: note = Description of Unknown: uncultivated organism sequence
  REGION 1..530: note = Category: MG81 effectors
  REGION 1..530: note = Description: MG81-18 effector
MILLANNNNNNNTDTCVLTLPLRVEKWQEDCLLKRFEAARRIYNSLLNFELKKLRQLERTVEYRQIQSVISSAYRSNTKDSPECKDALKRREKLISANGLAEYGFKSDVKFFYKHFDGLIGSNVAVHCIAVQLWAAFNKYLSGSGKEIHFKRLGEISSLKGYSVKGKSGGREIIFRGQYIEWTRKKKKLLLPLKIDPDNEYEREMLSRRVKYVRIIKKPGKNRLRWYAQLTLEGKPALKYSAETGKPIHSVGKGNVGIDIGPQTIAYASDKEVALLELADRVTNIEHQKKKLQRKLDRSRRATNPDNYKPDGTIKRGVKLTRNKSKRYLKLQSKLAYIQHRQAEIRKLQHTCLANHMLTLGDRFFVEKMNWSGLAHRAKETSISEKTGRYKRKKRFGKSLANKAPAMFISILKRKCETLGLPGVVEVDTYSLKASQYNHLSDTCEKKSLSERWNYMPISDGSDSSKTKRIQRDLYSAFLLQHTIPQPCSFDKEALRIDYPKFVIMHDAEIHRLESLPKTVTSMGVRRSHS

SEQ ID NO: 1741 - protein, 512 aa, unidentified
  REGION 1..512: note = Description of Unknown: uncultivated organism sequence
  REGION 1..512: note = Category: MG81 effectors
  REGION 1..512: note = Description: MG81-19 effector
MPTKQKEGGNRCVLTLPLLTEPWQEHIIEKRFKIIEHLKNQLISIELRKLKKLQRTKAYKNLIKQIESVPKSERTVLYKERNKMLKDAGFSQYTFMDDMAGKKSLMQKHFESHINVQIAHKAAIDVWSSFEKFLFGTGQIVHYQKRGTLSSVASKSPKTGMFYYSDENIFKWSGGGTKPKGGIILCLRVASVKTNYEKEMVANNEIKYYRVVRKWMKTKYKYYLQITFAGKPADKHREISTGRVGIDIGTQTIAIASDKSVKLLELADKVNKNHIKKCELQRKLDRSRQYTNPDNFNPDGTVKRGTKGHKLKWNKSKHYLEVAGKIRELERKNADIRKYQHTCLANDILAMGNQIYIEPMNYKGLQKRAKETQVDEKGRYKKKKRFGKSLANKAPAMFVTILKTKAEQHGGEVYEVDIMSYRASQCDHTTGEYTKHGLNDRWRILGNGDKVQRDLYSAFLIKNSNKTHDEIDLDKCSKTYDSFKKLHDKEIENIRNEVILRKRRNISSYGIA

SEQ ID NO: 1742 - protein, 512 aa, unidentified
  REGION 1..512: note = Description of Unknown: uncultivated organism sequence
  REGION 1..512: note = Category: MG81 effectors
  REGION 1..512: note = Description: MG81-20 effector
MPTKQKEGGNRCVLTLPLLTEPWQEHIIEKRFKIIEHLKNQLISIELRKLKKLQRTKAYKNLIKQIESVPKSERTVLYKERNKMLKDAGFSQYTFMDDMAGKKSLMQKHFESHINVQIAHKAAIDVWSSFEKFLFGTGQIVHYQKRGTLSSVASKSPKTGMFYYSDENIFKWSCGGTKPKGGIILCLRVASVKTNYEKEMVANNEIKYYRVVRKWMKTKYKYYLQITFAGKPADKHREISTGRVGIDIGTQTIAIASDKSVKLLELADKVNKNHIKKCELQRKLDRSRRYTNPDNFNPDGTVKRGTKGHKLKWNKSKHYLEVAGKIRELERKNADIRKYQHTCLANDILAMGNQIYIEPMNYKGLQKRAKETQVDEKGRYKKKKRFGKSLANKAPAMFVTILKTKAEQHGGEVYEVDIMSYRASQCDHTTGEYTKHGLNDRWRILGNGDKVQRDLYSAFLIKNSNKTHDEIDLDKCSKTYDSFKKLHDKEIENIRNEVILRKRRNISSYGIA

SEQ ID NO: 1743 - protein, 512 aa, unidentified
  REGION 1..512: note = Description of Unknown: uncultivated organism sequence
  REGION 1..512: note = Category: MG81 effectors
  REGION 1..512: note = Description: MG81-21 effector
MPTKQKEDSNRCVLTLPLLTEPWQEHIIEKRFKIIEHLKNQLISIELRKLKKLQRTKAYKNLIKQIESVPKSERTALYKERNKMLKDAGFSQYTFMDDMAGKKSLMQKHFESHINVQIAHKAAIDVWSSFEKFLFGTGQIVHYQKRGTLSSVASKSPKTGMFYYSDENIFKWSGGGTKPKGGIILCLRGASVKTNYEKEMVANNEIKYYRVVRKWMKTKYKYYLQITFAGKPADKHREISTGRVGIDIGTQTIAIASDKSVKLLELADKVNKNHIKKCELQRKLDRSRRYTNPDNFNPDGTVKRGTKGHKLKWNKSKHYIEIAGKIRELERKNADIRKYQHTCLANDILAMGNQIYIEPMNYKGLQKRAKETQVDEKGRYKKKKRFGKSLANKAPAMFVTILKTKAEQHGGEVYEVDIMSYRASQCDHTTGEYTKHGLNDRWRILGNGDKVQRDLYSAFLIKNSNKTHDEIDLDKCSKTYDNFKKLHDTEIENIRNEVKLRERKNISSYGIA

SEQ ID NO: 1744 - protein, 512 aa, unidentified
  REGION 1..512: note = Description of Unknown: uncultivated organism sequence
  REGION 1..512: note = Category: MG81 effectors
  REGION 1..512: note = Description: MG81-22 effector
MPTKQKEDSNRCVLTLPLLTEPWQEHIIEKRFKIIEHLKNQLISIELRKLKKLQRTKAYKNLIKQIESVPKSERTVLYKKRNKMLKDAGFSQYTFMDDMAGKKSLMQKHFESHINVQIAHKAAIDVWSSFEKFLFGSGQMIHYQKRGTLSSVASKSPKTGMFYYSDENIFKWSGGGTKPKGGIILCLRVASVKTNYEKEMVANNEIKYYRVVRKWMKTKYKYYLQITFAGKPADKHHEVSTDRVGIDIGTQTIAIASDKSVKLLELADKVNKNHIKKCELQRKLDRSRRYTNPDNFNPDGTVKRGTKGHKLKWNKSKHYIEIAGKIRELERKNADIRKYQHTCLANDILAMGNQIYIEPMNYKGLQKRAKETQVDEKGRYKKKKRFGKSLANKAPAMFVTILKTKAEQHGGEVYEVDIMSYRASQCDHTTGEYTKHGLNDRWRILGNGDKVQRDLYSAFLIKNSNKTHDEIDLDKCSKTYDNFKKLHDKEIENIRNEVILRKRRNISSYGIA

SEQ ID NO: 1745 - protein, 528 aa, unidentified
  REGION 1..528: note = Description of Unknown: uncultivated organism sequence
  REGION 1..528: note = Category: MG81 effectors
  REGION 1..528: note = Description: MG81-23 effector
MILLTKNNNNTDTCVLTLPLRVEKWQEDCLLKRFEAARRIYNSLLNFELKKLRQLERTVEYRQIQSVISSAYRSNTKDSPECKDAFKRREKLISANGISEYGFKSDVKFFYKHFDGLIGSNVAVHCIAVQLWAAFDKYLRGSGKEIHFKRLGDISSLKGYSVKGKSGGCEIIFRGQYIEWTRKKKKLLLPLKIDPDNEYEREMLSRRVKYVRIIKKPGKNRLRWYAQLTLEGKPALKYSAETGKPIHSVGKGNVGIDIGPQTVAYASDKEVALLELADRVTNIEHQKKKLQRKLDRSRRATNPDNYKPDGTIKRGVKLTRNKSKRYLKLQSKLAYIQHRQAEIRKLQHTCLANHMLTLGDRFFVEKMNWPGLAHRAKETSISEKTGRYKRKKRFGKSLANKAPAMFISILKRKCETLGLPGVVEVDTYSLKASQYNHLSDTYEKKSLSERWNYMPISDGSDSSKTKRIQRDLYSAFLLQHTIPQPCSFDKKALRIDYPNFVTMHDAEIHRLESLPKTITSMGVRRSHS

SEQ ID NO: 1746 - protein, 512 aa, unidentified
  REGION 1..512: note = Description of Unknown: uncultivated organism sequence
  REGION 1..512: note = Category: MG81 effectors
  REGION 1..512: note = Description: MG81-24 effector
MPTKQKEDSNRCVLTLPLLTEPWQEHIIEKRFKIIEHLKNQLISIELRKLKNLQRTKAYKNLIKQIESVPKSERTVLYKERNKMLKDAGFSQYTFMDDMAGKKSLMQKHFESHINVQIAHKAAIDVWSSFEKFLFGTGQIVHYQKRGTLSSVASKSPKTGMFYYSDENIFKWSGGGTKPKGGIILCLRVASVKTNYEKEMVANNEIKYYRVVRKWMKTKYKYYLQITFAGKPADKHREISTGRIGIDIGTQTIAIASDKSVKLLELADKVNKNHIKKCELQRKLDRSRRYTNPDNFNPDGTVKRGTKGHKLKWNKSKHYIEIAGKIRELERKNADIRKYQHTCLANDILAMGNQIYIEPMNYKGLQKRVKETQVDEKGRYKKKKRFGKSLANKAPAMFVTILKTKAEQHGGEVYEVDIMSYRASQCDHTTGEYTKHGLNDRWRILGNGDKVQRDLYSAFLIKNSNKTHDEIDLDKCSKTYDSFKKLHDKEIENIRNEVKLRERKNISSYGIA

SEQ ID NO: 1747 - protein, 512 aa, unidentified
  REGION 1..512: note = Description of Unknown: uncultivated organism sequence
  REGION 1..512: note = Category: MG81 effectors
  REGION 1..512: note = Description: MG81-25 effector
MPTKQKEGGNRCVLTLPLLTEPWQEHIIEKRFKIIEHLKNQLISIELRKLKNLQRTKAYKNLIKQIESVPKSERTALYKERNKMLKDAGFSQYTFMDDMAGKKSLMQKHFESHINVQIAHKAAIDVWSSFEKFLFGTGQIVHYQKRGTLSSVASKSPKTGMFYYPDENIFKWSGGGTKPKGGIILCLRVASVKTNYEKEMVANNEIKYYRVVRKWMKTKYKYYLQITFAGKPADKHREISTGRVGIDIGTQTIAIASDKSVKLLELADKVNKNHIKKCELQRKLDRSRRYTNPDNFNPDGTVKRGTKGHKLKWNKSKHYIEIAGKIRELERKNADIRKYQHTCLANDILAMGNQIYIEPMNYKGLQKRAKETQVDEKGRYKKKKRFGKSLANKAPAMFVTILKTKAEQHGGEVYEVDIMSYRASQCDHTTGEYTKHGLNDRWRILGNGDKVQRDLYSAFLIKNSNKTHDAIDLDKCSKTYDSFKKLHDKEIENIRNEVKLRERKNISSYGIA

SEQ ID NO: 1748 - protein, 512 aa, unidentified
  REGION 1..512: note = Description of Unknown: uncultivated organism sequence
  REGION 1..512: note = Category: MG81 effectors
  REGION 1..512: note = Description: MG81-26 effector
MPTKQKEDSNRCVLTLPLLTEPWQEHIIEKRFKIIEHLKNQLISIELRKLKNLQRTKAYKNLMKRIESVPKSERTALYKERNKMLEGKGFSQYTFMDDMAGKKSLMQKHFESHINVQIAHKAAIDVWSSFEKFLFGSGQMIHYQKRGTLSSVASKSPKTGMFYYPDENIFKWSGGGTKPKGGIILCLRVASVKTNYEKEMVANNEIKYYRVVRKWMKTKYKYYLQITFAGKPADKHREISTGRVGIDIGTQTIAIASDKSVKLLELADKVNKNHIKKCELQRKLDRSRRYTNPDNFNPDGTVKRGTKGHKLKWNKSKHYLEIAGKIRELERKNADIRKYQHTCLANDILAMGNQIYIEPMNYKGLQKRAKETQVDEKGRYKKKKRFGKSLANKAPAMFVTILKTKAEQHGGEVYEVDIMSYRASQCDHTTGEYTKHGLNDRWRILGNGDKVQRDLYSAFLIKNSNKTHDEIDLDKCSKTYDSFKKLHDKEIENIRNEVKLRERKNISSYGIA

SEQ ID NO: 1749 - protein, 527 aa, unidentified
  REGION 1..527: note = Description of Unknown: uncultivated organism sequence
  REGION 1..527: note = Category: MG81 effectors
  REGION 1..527: note = Description: MG81-27 effector
MAKNNNNNNTDTCVLTLPLRVEKWQEDCLLKRFEAARRIYNSLLNFELKKLRQLERTVEYRQIQSVISSAYRSNTKDSPECKDAFKRREKLISANGISEYGFKSDVKFFYKHFDGLIGSSVAVHCIAVQLWAAFDKYLRGSGKEIHFKRLGEISSLKGYSVKGKSGGLEIIFRGQYIEWTRKKKKLLLPLKIDPDNEYEREMLSRRVKYVRIIKKPGKNRLRWYAQLTLEGKPALKYSAETGKPIHSVGKGNVGIDIGPQTVAYASDKEVALLELADRVTNIEHQKKKLQRKLDRSRRATNPDNYKPDGTIKRGVKLTRNKSKRYLKLQSKLAYIQHRQAEIRKLQHTCLANHMLTLGDRFFVEKMNWPGLAHRAKETSISEKTGRYKRKKRFGKSLANKAPAMFISILKRKCETLGLPGVVEVDTYNLKASQYNHLSDTYEKKSLSERWNYMPISDGSDSSKTKRIQRDLYSAFLLQHTIPQPCSFDKEALRIDYPNFVTMHDAEIHRLESLPKTVTSMGVRRSHS

SEQ ID NO: 1750 - protein, 512 aa, unidentified
  REGION 1..512: note = Description of Unknown: uncultivated organism sequence
  REGION 1..512: note = Category: MG81 effectors
  REGION 1..512: note = Description: MG81-28 effector
MPTKQKEDSNRCVLTLPLLTEPWQEHIIEKRFKIIEHLKNQLIFIELRKLKNLQRTKAYKNLIKQIESVPKSERTALYKERNKMLKDAGFSQYTFMDDMAGKKSLMQKHFESHINVQIAHKAAIDVWSSFEKFLFGTGQIVHYQKRGTLSSVASKSPKTGMFYYSDENIFKWSGGGTKPKGGIILCLRVASVKTNYEKEMVANNEIKYYRVVRKWMKTKYKYYLQITFAGKPADKHREISTGRVGIDIGTQTIAIASDKSVKLLELADKVNKNHIKKCELQRKLDRSRRYTNPDNFNPDGTVRRGTKGHKLKWNKSKHYIEIAGKIRELERKNADIRKYQHTCLANDILAMGNQIYIEPMNYKGLQKKAKETQVDEKGRYKKKKRFGKSLANKAPAMFVTILKTKAEQHGGEVYEVDIMSYRASQCDHTTGEYTKHGLNDRWRILGNGDKVQRDLYSAFLIKNSNKTHDEIDLDKCSKTYDNFKKLHDKEIENIRNEVKLRERKNISSYGIA

SEQ ID NO: 1751 - protein, 512 aa, unidentified
  REGION 1..512: note = Description of Unknown: uncultivated organism sequence
  REGION 1..512: note = Category: MG81 effectors
  REGION 1..512: note = Description: MG81-29 effector
MPTKQKEDSNRCVLTLPLLTEPWQEHIIEKRFKIIEHLKNQLISIELRKLKNLQRTKAYKNLIKQIESVPKSERTVLYKERNKMLKDAGFSQYTFMDDMAGKKSLMQKHFESHINVQIAHKAAIDVWSSFEKFLFGTDQMIHYQKRGTLSSVASKSPKTGMFYYSDENIFKWSGGGTKPKGGIILCLRVASVKTNYEKEMVANNEIKYYRVVRKWMKTKYKYYLQITFAGKPADKHREISTGRVGIDIGTQTIAIASDKSVKLLELADKVNKNHIKKCELQRKLDRSRRYTNPDNFNPDGTVKRGTKGHKLKWNKSKHYLEIAGKIRELERKNADIQKYQHTCLANDILAMGNQIYIEPMNYKGLQKRAKETQVDEKGRYKKKKRFGKSLANKAPAMFVTILKTKVEQHGGEVYEVDIMSYRASQCDHTTGEYTKHGLNDRWRILGNGDKVQRDLYSAFLIKNSNKTHDEIDLDKCSKTYDSFKKLHDKEIENIRNEVKLRERRNISSYGIA

SEQ ID NO: 1752 - protein, 512 aa, unidentified
  REGION 1..512: note = Description of Unknown: uncultivated organism sequence
  REGION 1..512: note = Category: MG81 effectors
  REGION 1..512: note = Description: MG81-30 effector
MPTKQKEDSNRCVLTLPLLTEPWQEHIIEKRFKIIEHLKNQLISIELRKLKNLQRTKAYKNLIKQIESVPKSERTALYKERNKMLKDAGFSQYTFMDDMAGKKSLMQKHFESHINVQIAHKAAIDVWSSFEKFLFGTGQIVHYQKRGTLSSVASKSPKTGMFYYSDENIFKWSGGGTKPKGGIILCLRVASVKTNYEKEMVANNEIKYYRVVRKWMKTKYKYYLQITFAGKPADKHREISTGRVGIDIGTQTIAIASDKSVKLLELADKVNKNHIKKCELQRKLDRSRRYTNPDNFNPDGTVKRGTKGHKLKWNKSKHYLEIAGKIRELERKNADIRKYQHTCLANDILAMGNQIYIEPMNYKGLQKRVKETQVDEKGRYKKKKRFGKSLANKAPSMFVTILKTKAEQHGGEVYEVDIMSYRASQCDHTTGEYTKHGLNDRWRILGNGDKVQRDLYSAFLIKNSNKTHDEIDLDKCSKTYDNFKKLHDKEIENIRNEVKLRERRNISSYGIA

SEQ ID NO: 1753 - protein, 531 aa, unidentified
  REGION 1..531: note = Description of Unknown: uncultivated organism sequence
  REGION 1..531: note = Category: MG81 effectors
  REGION 1..531: note = Description: MG81-31 effector
MILLANNNNNNNNTDTCVLTLPLRVEKWQEDCLLKRFEAARRIYNSLLNFELKKLRQLERTAEYRQIQSVISSAYRSNTKDSLECKDAFKRREKLISANGISENGFKSDVKFFYKHFDGLIGSSVAVHCIAVQLWAAFDKYLSGSGKEIHFKRLGDISSLKGYSVKGKSGGCEIIFRGQYVEWTRKKKKLLLPLKIDPDNEYEREMLSRRVKYVRIIKKPGKNRLRWYAQLTLEGKPALKYSAGTGKPIHSVGKGNVGIDIGPQTVAYASDKEVALLELADRVTNIEHQKKKLQRKLDRSRRATNPDNYKPDGTIKRGVKLTRNKSKRYLKLQSKLAYIQHRQAEIRKLQHTCLANHMLTLGDRFFVEKMNWPGLAHRAKETSISEKTGRYKRKKRFGKSLANKAPAMFISILKRKCETLGLPGVVEVDTYSLKASQYNHLSDTYEKKSLSERWNYMPISDGSDSSKTKRIQRDLYSAFLLQHTIPQPCSFDKEALRIDYPNFVTMHDAEIHRLESLPKTVTSMGVRRSHS

SEQ ID NO: 1754 - protein, 512 aa, unidentified
  REGION 1..512: note = Description of Unknown: uncultivated organism sequence
  REGION 1..512: note = Category: MG81 effectors
  REGION 1..512: note = Description: MG81-32 effector
MPTKQKEGGNRCVLTLPLLTEPWQEHIIEKRFKIIEHLKNQLISIELRKLKKLQRTKAYKNLIKQIESVPKSERTVLYKERNKMLKDAGFSQYTFMDDMAGKKSLMQKHFESHINVQIAHKAAIDVWSSFEKFLFGTGQIVHYQKRGTLSSVASKSPKTGMFYYSDENIFKWSGGGTKPKGGIILCLRVASVKTNYEKEMVANNEIKYYRVVRKWMKTKYKYYLQITFAGKPADKHREISTGRVGIDIGTQTIAIASDKSVKLLELADKVNKNHIKKCELQRKLDRSRRYTNPDNFNPDGTVKRGTKGHKLKWNKSKHYLEVAGKIRELERKNADIRKYQHTCLANDILAMGNQIYIEPMNYKDLQKRAKETQVDEKGRYKKKKRFGKSLANKAPAMFVTILKTKAEQHGGEVYEVDIMSYRASQCDHTTGEYTKHGLNDRWRILGNGDKVQRDLYSAFLIKNSNKTHDEIDLDKCSKTYDSFKKLHDKEIENIRNEVILRKRRNISSYGIA

SEQ ID NO: 1755 - protein, 534 aa, unidentified
  REGION 1..534: note = Description of Unknown: uncultivated organism sequence
  REGION 1..534: note = Category: MG81 effectors
  REGION 1..534: note = Description: MG81-33 effector
MILLANNNNNNNNNNNTDTCVLTLPLRVEKWQEDCLLKRFEAARRIYNSLLNFELKKLRQLERTVEYRQIQSVISSAYRSNTKDSLECKDAFKRREKLISANGISENGFKSDVKFFYKHFDGLIGSSVAVHCIAVQLWAAFDKYLSGSGKEIHFKRLGDISSLKGYSVKGKSGGLEIIFRGQYVEWTRKKKKLLLPLKIDPDNEYEREMLSRRVKYVRIIKKPGKNRLRWYAQLTLEGKPALKYSAGTGKPIHSVGKGNVGIDIGPQTVAYASDKEVALLELADRVTNIEHQKKKLQRKLDRSRRATNPDNYKPDGTIKCGVKLTRNKSKRYLKLQSKLAYIQHRQAEIRKLQHTCLANHMLTLGDRFFVEKMNWPGLAHRAKETSISEKTGRYKRKKRFGKSLANKAPAMFISILKRKCETLGLPGVVEVDTYSLKASQYNHLSDTYEKKSLSERWNYMPISDGSDSSKTKRIQRDLYSAFLLQHTIPHPCSFDKEALRIDYPNFVIMHDAEIHRLEFLPKTVTSMGVRRSHS

SEQ ID NO: 1756 - protein, 528 aa, unidentified
  REGION 1..528: note = Description of Unknown: uncultivated organism sequence
  REGION 1..528: note = Category: MG81 effectors
  REGION 1..528: note = Description: MG81-34 effector
MILLANNNNNTDTCVLTLPLRVEKWQEDCLLKRFEAARRIYNSLLNFELKKLRQLERTVEYRQIQSVISSAYRSNTKDSLECKDAFKRRKKLTDENGISEYGFKSDVKFFYKHFDGLIGSNVAVHCIAVQLWAAFDKYLSGSGKEIHFKRLGDISSLKGYSVKGKSGGCEIIFRGQYVEWTRKKKKLLLPLKIDPDNEYEREMLSRRVKYVRIIKKPGKNRLRWYAQLTLEGKPALKYSAETGKPIHSVGKGNVGIDIGPQTVAYASDKEVALLELADRVTNIEHQKKKLQRKLDRSRRATNPDNYKPDGTIKRGVKLTRNKSKRYLKLQSKLAYIQHRQAEIRKLQHTCLANHMLTLGDRFFVEKMNWPGLAHRAKETSISEKTGRYKRKKRFGKSLANKAPAMFISILKRKCETLGLPGVVEVDTYNLKASQYNHLSDTCEKKSLSERWNYMPISDGSDSSKTKRIQRDLYSAFLLQHTIPQPCSFDKEALRIDYPNFVIMHDAEIHRLESLPKTITSMGVRRSHS

SEQ ID NO: 1757 - protein, 536 aa, unidentified
  REGION 1..536: note = Description of Unknown: uncultivated organism sequence
  REGION 1..536: note = Category: MG81 effectors
  REGION 1..536: note = Description: MG81-35 effector
MANNNNNNNNNNNNNNNNTDTCVLTLPLRVEKWQEDCLLKRFEAARRIYNSLLNFELKKLRQLERTVEYRQIQSVISSAYRSNTKDSLECKDAFKRRKKLTDENGISEYGFKSDVKFFYKHFDGLIGSNVAVHCIAVQLWAAFDKYLRGSGKEIHFKRLGDISSLKGYSVKGKSGGREIIFRGQYVEWIRKKKKLLLPLKIDPDNEYEREMLSRRVKYVRIIKKPGKNRLRWYAQLTLEGKPALKYSAGTGKPIHSVGKGNVGIDIGPQTVAYASDKEVALLELADRVTNIEHQKKKLQRKLDRSRRATNPDNYKPDGTIKRGVKLTRNKSKRYLKLQSKLAYIQHRQAEIRKLQHTCLANHMLTLGDRFFVEKMNWPGLAHRAKETSFSEKTGRYKRKKRFGKSLANKAPAMFISILKRKCETLGLPGVVEVDTYNLKASQYNHLSDTYEKKSLSERWNYMPISDGSDSSKTKRIQRDLYSAFLLQHTIPQPCSFDKEALRIDYPNFVTMHDAEIHRLESLPKTVTSMGVRRSHS

SEQ ID NO: 1758 - protein, 512 aa, unidentified
  REGION 1..512: note = Description of Unknown: uncultivated organism sequence
  REGION 1..512: note = Category: MG81 effectors
  REGION 1..512: note = Description: MG81-36 effector
MPTKQKEGGNRCVLTLPLLTEPWQEHIIEKRFKIIEHLKNQLISIELRKLKNLQRTKAYKNLIKQIESVPKSERTALYKERNKMLKDAGFSQYTFMDDMAGKKSLMQKHFESHINVQIAHKAAIDVWSSFEKFLFGTGQIVHYQKRGTLSSVASKSPKTGMFYYSDENIFKWSGGGTKPKGGIILCLRVASVKTNYEKEMVANNEIKYYRVVRKWMKTKYKYYLQITFAGKPADKHREISTGRVGIDIGTQTIAIASDKSVKLLEFADKVNKNHIKKCELQRKLDRSRQYTNPDNFNPDGTVKRGTKGHKLKWNKSKHYLEVAGKIRELERKNADIRKYQHTCLANDILAMGNQIYIEPMNYKGLQKRVKETQVDEKGRYKKKKRFGKSLANKAPAMFVTILKTKAEQHGGEVYEVDIMSYRASQCDHTTGEYTKHGLNDRWRILGNGDKVQRDLYSAFLIKNSNKTHDEIDLDKCSKTYDNFKKLHDKEIENIRNEVILRERRNISSYGIA

SEQ ID NO: 1759 - protein, 528 aa, unidentified
  REGION 1..528: note = Description of Unknown: uncultivated organism sequence
  REGION 1..528: note = Category: MG81 effectors
  REGION 1..528: note = Description: MG81-37 effector
MILLTKNNNNTDTCVLTLPLRVEKWQEDCLLKRFEAARRIYNSLLNFELKKLRQLERTVEYRQIQSVISSAYRSNTKDSLECKDAFKHREKLISANGISKNGFKSDVKFFYKHFDGLIGSSVAVHCIAVQLWAAFDKYLSGSGKEIHFKRLGDISSLKGYSVKGKSGGCEIIFRGQYVEWTRKKKKLLLPLKIDPDNEYEREMLSRRVKYVRIIKKPGKNRLRWYAQLTLEGKPALKYSAETGKPIHSVGKGNVGIDIGPQTVAYASDKEVALLELADRVTNIEHQKKKLQRKLDRSRRATNPDNYKPDGTIKRGVKLTRNKSKRYLKLQSKLAYIQHRQAEIRKLQHTCLANHMLTLGDRFFVEKMNWPGLAHRAKETSISEKTGRYKRKKRFGKSLANKAPAMFISILKRKCETLGLPGVVEVDTYSLKASQYNHLSDTCEKKSLSERWNYMPISDGSDSSKTKRIQRDLYSAFLLQHTIPQPCSFDKEALRIDYPNFVIMHDAEIHRLESLPKTITSMGVRRSHS

SEQ ID NO: 1760 - protein, 526 aa, unidentified
  REGION 1..526: note = Description of Unknown: uncultivated organism sequence
  REGION 1..526: note = Category: MG81 effectors
  REGION 1..526: note = Description: MG81-38 effector
MAKKNSNDTDTCVLTLPLRVEKWQEDCLLKRFEAARRIYNSLLNFELKKLRQLERTVEYRQIQSVISSAYRSNTKDSPECKDAFKRREKLISANGISEYGFKSDVKFFYKHFDGLIGSSVAVHCIAVQLWAAFDKYLRGSGKEIHFKRLGEISSLKGYSVKGKSGGLEIIFRGQYIEWTRKKKKLLLPLKIDPDNEYEREMLSRRVKYVRIIKKPGKNRLRWYAQLTLEGKPALKYSAETGKPIHSVGKGNVGIDIGPQTVAYASDKEVALLELADRVTNIEHQKKKLQRKLDRSRRATNPDNYKPDGTIKRGVKLTRNKSKRYLKLQSKLAYIQHRQAEIRKLQHTCLANHMLTLGDRFFVEKMNWPGLAHRAKETSISEKTGRYKRKKRFGKSLANKAPAMFISILKRKCETLGLPGVVEVDTYSLKASQYNHLSDTYEKKSLSERWNYMPISDGSDSSKTKRIQRDLYSAFLLQHTIPQPCSFDKEALRIDYPNFVIMHDAEIHRLESLPKTITSMGVRRSHS

SEQ ID NO: 1761 - protein, 530 aa, unidentified
  REGION 1..530: note = Description of Unknown: uncultivated organism sequence
  REGION 1..530: note = Category: MG81 effectors
  REGION 1..530: note = Description: MG81-39 effector
MILLAKNNNNNNTDTCVLTLPLRVEKWQEDCLLKRFEAARRIYNSLLNFELKKLRQLERTVEYRQIQSVISSAYRSNTKDSPECKDAFKRREKLISANGISENGFKSDVKFFYKHFDGLIGSNVAVHCIAVQLWAAFDKYLSGSGKEIHFKRLGDISSLKGYSVKGKSGGCEIIFRGQYVEWTRKKKKLLLPLKIDPDNEYEREMLSRRVKYVRIIKKPGKNRLRWYAQLTLEGKPALKYSAETGKPIHSVGKGNVGIDIGPQTVAYASDKEVALLELADRVTNIEHQKKKLQRKLDRSRRATNPDNYKPDGTIKCGVKLTRNKSKRYLKLQSKLAYIQHRQAEIRKLQHTCLANHMLTLGDRFFVEKMNWPGLAHRAKETSISEKTGRYKRKKRFGKSLTNKAPAMFISILKRKCETLGLPGVVEVDTYSLKASQYNHLSDTYEKKSLSERWNYMPISDGSDSSKTKRIQRDLYSAFLLQHTIPHPCSFDKKALRIDYPNFVTMHDAEIHRLESLPKTITSMGVRRSHS

SEQ ID NO: 1762 - protein, 526 aa, unidentified
  REGION 1..526: note = Description of Unknown: uncultivated organism sequence
  REGION 1..526: note = Category: MG81 effectors
  REGION 1..526: note = Description: MG81-40 effector
MAKKNNNDTDTCVLTLPLRVEKWQEDCLLKRFEAARRIYNSLLNFELKKLRQLERTVEYRQIQSVISSAYRSNTKDSLECKDAFKRREKLISANGISENGFKSDVKFFYKHFDGLIGSSVAVHCIAVQLWAAFDKYLSGSGKEIHFKRLGDISSLKGYSVKGKSGGCEIIFRGQYVEWTRKKKKLLLPLKIDPDNEYEREMLSRRVKYVRIIKKPGKNRLRWYAQLTLEGKPALKYSAETGKPIHSVGKGNVGIDIGPQTVAYASDKEVALLELADRVTNIEHQKKKLQRKLDRSRRATNPDNYKPDGTIKRGVKLTRNKSKRYLKLQSKLAYIQHRQAEIRKLQHTCLANHMLTLGDRFFVEKMNWPGLAHRAKETSISEKTGRYKRKKRFGKSLANKAPAMFISILKRKCETLGLPGVVEVDTFRLRASQYNHLSDTYEKKSLSERWNYMPISDGSDSSKTKRIQRDLYSAFLLQHTIPQPCSFDKKALRIDYPNFVTMHDAEIHRLESLPKTITSMGVRRSHS

SEQ ID NO: 1763 - protein, 524 aa, unidentified
  REGION 1..524: note = Description of Unknown: uncultivated organism sequence
  REGION 1..524: note = Category: MG81 effectors
  REGION 1..524: note = Description: MG81-41 effector
MAKNNNTDTCVLTLPLRVEKWQEDCLLKRFEAARRIYNSLLNFELKKLRQLERTVEYRQIQSVISSAYRSNTKDSPECKDAFKRREKLISANGISEYGFKSDVKFFYKHFDGLIGSSVAVHCIAVQLWAAFDKYLRGSGKEIHFKRLGEISSLKGYSVKGKSGGLEIIFRGQYIEWTRKKKKLLLPLKIDPDNEYEREMLSRRVKYVRIIKKPGKNRLRWYAQLTLEGKPALKYSAETGKPIHSVGKGNVGIDIGPQTVAYASDKEVALLELADRVTNIEHQKKKLQRKLDRSRRATNPDNYKPDGTIKRGVKLTRNKSKRYLKLQSKLAYIQHRQAEIRKLQHTCLANHMLTLGDRFFVEKMNWPGLAHRAKETSISEKTGRYKRKKRFGKSLANKAPAMFISILKRKCETLGLPGVVEVDTYNLKASQYNHLSDTYEKKSLSERWNYMPISDGSDSSKTKRIQRDLYSAFLLQHTIPQPCSFDKEALRIDYPNFVTMHDAEIHRLESLPKTVTSMGVRRSHS

SEQ ID NO: 1764 - protein, 341 aa, unidentified
  REGION 1..341: note = Description of Unknown: uncultivated organism sequence
  REGION 1..341: note = Category: MG81 effectors
  REGION 1..341: note = Description: MG81-42 effector
MLPLKIDPDNEYEREMLSRRVKYVRIIKKPGKNRLRWYAQLTLEGKPALKYSAETGKPIHSVGKGNVGIDIGPQTVAYASDKEVALLELADRVTNIEHQKKKLQRKLDRSRRATNPDNYKPDGTIKRGVKLTRNKSKRYLKLQSKLAYIQHRQAEIRKLQHTCLANHMLTLGDRFFVEKMNWPGLAHRAKETSISEKTGRYKRKKRFGKSLANKAPAMFISILKRKCETLGLPGVVEVDTYNLKASQYNHLSDTYEKKSLSERWNYMPISDGSDSSKTKRIQRDLYSAFLLQHTIPQPCSFDKEALRIDYPNFVTMHDAEIHRLESLPKTVTSMGVRRSHS

SEQ ID NO: 1765 - protein, 534 aa, unidentified
  REGION 1..534: note = Description of Unknown: uncultivated organism sequence
  REGION 1..534: note = Category: MG81 effectors
  REGION 1..534: note = Description: MG81-43 effector
MILLANNNNNNNNNNNTDTCVLTLPLRVEKWQEDCLLKRFEAARRIYNSLLNFELKKLRQLERTVEYRQIQSVISSAYRSNTKDSPECKDAFKRREKLISANGISEYGFKSDVKFFYKHFDGLIGSNVAVHCIAVQLWAAFDKYLRGSGKEIHFKRLGDISSLKGYSVKGKSGGCEIIFRGQYIEWTRKKKKLLLPLKIDPDNEYEREMLSRRVKYVRIIKKPGKNRLRWYAQLTLEGKPALKYSAETGKPIHSVGKGNVGIDIGPQTVAYASDKEVALLELADRVTNIEHQKKKLQRKLDRSRRATNPDNYKPDGTIKRGVKLTRNKSKRYLKLQSKLAYIQHRQAEIRKLQHTCLANHMLTLGDRFFVEKMNWPGLAHRAKETSISEKTGRYKRKKRFGKSLANKAPAMFISILKRKCETLGLPGVVEVDTYSLKASQYNHLSDTYEKKSLSERWNYMPISDGSDSSKTKRIQRDLYSAFLLQHTIPQPCSFDKKALRIDYPNFVTMHDAEIHRLESLPKTITSMGVRRSHS

SEQ ID NO: 1766 - protein, 511 aa, unidentified
  REGION 1..511: note = Description of Unknown: uncultivated organism sequence
  REGION 1..511: note = Category: MG81 effectors
  REGION 1..511: note = Description: MG81-44 effector
MKKSNTDTCCLTLPLKLEKWQEDRLAKRFEIARQIYNTMVHAELKKLRNIENSQPYRQIQKQIEALNWKNQNDKARLKSLYNDRNKLLNTIGFSEYGFKADIKYYYKHFNDNIGSSVAVHGIAPQVWAAFEKMLFHKEGKKVHYKKKDDIHSLHGYSVTGKSGGVEIIFRKTYIEWKGLKLPLKRSPDNAYETEMLGRRVKYVRLLRKPGKRKDCWYAQLSLEGKPAIKRDPESGKRRHSIGRGAVGLDIGPQTLAYSACGAADLVELADQVQNIEQMKRRLQRKLDRSRRATNPDNYADNGTIRRGVKLTHNKSNRYRRTQRELRYLQHCQAEIRKRQHIELANHLLALGDCFYVEDMAWPSLTHRAKETAISEKTGRIKRKKRFGKSVANKAPATLIGILEQKCNSLGLPGVMKVPTSLRASQYNHQSGEYTSKPLSQRWNNMPDGERIQRDLYSAFLLQHYDPKAGNFDSALLQQDYPQFVQYHHRAIQRLSTVPKTLSSMGIQRSLR

SEQ ID NO: 1767 - protein, 512 aa, unidentified
  REGION 1..512: note = Description of Unknown: uncultivated organism sequence
  REGION 1..512: note = Category: MG81 effectors
  REGION 1..512: note = Description: MG81-45 effector
MPTKQKEDSNRCVLTLPLLTEPWQEHIIEKRFKIIEHLKNQLISIELRKFKNLQRTKAYKNLIKQIESVPKSERTVLYKERNKMLKDAGFSQYTFMDDMAGKKSLMQKHFESHINVQIAHKAAIDVWSSFEKFLFGSGQMIHYQKRGTLSSVASKSPKTGMFYYSDENIFKWSGGGTKPKGGIILCLRVASVKTNYEKEMVANNEIKYYRVVRKWMKTKYKYYLQITFAGKPADKHREISTGRVGIDIGTQTIAIASDKSVKLLELADKVNKNHIKKCELQRKLDRSRRYTNPDNFNPDGTVKRGTKGHKLKWNKSKHYLEIAGKIRELERKNADIRKYQHTCLANDILAMGNQIYIEPMNYKGLQKRAKETQVDEKGRYKKKKRFGKSLANKAPAMFVTILKTKVEQHGGEVYEVDIMLYRASQCDHTTGEYTKHGLNDRWRILGNGDKVQRDLYSAFLIKNSNKTHDEIDLDKCSKTYDNFKKLHDKEIENIRNEVKLRERKNISSYGIA

SEQ ID NO: 1768 - protein, 530 aa, unidentified
  REGION 1..530: note = Description of Unknown: uncultivated organism sequence
  REGION 1..530: note = Category: MG81 effectors
  REGION 1..530: note = Description: MG81-46 effector
MILLAKNNNNNNTDTCVLTLPLRVEKWQEDCLLKRFEAARRIYNSLLNFELKKLRQLERTVEYRQIQSVISSAYRSNTKDSPECKDAFKRREKLISANGISEYGFKSDVKFFYKHFDGLIGSSVAVHCIAVQLWAAFDKYLSGSGKEIHFKRLGDISSLKGYSVKGKSGGREIIFRGQYIEWTRKKKKLLLPLKIDPDNEYEREMLSRRVKYVRIIKKPGKNRLRWYAQLTLEGKPALKYSAGTGKPIHSVGKGNVGIDIGPQTVAYASDKEVALLELADRVTNIEHQKKKLQRKLDRSRRATNPDNYKPDGTIKRGVKLTRNKSKRYLKLQSKLAYIQHRQAEIRKLQHTCLANHMLTLGDRFFVEKMNWPGLAHRAKETSISEKTGRYKRKKRFGKSLANKAPAMFISILKRKCETLGLPGVVEVDTYSLKASQYNHLSDTYEKKSLSERWNYMPISDGSDSSKTKRIQRDLYSAFLLQHTIPQPCSFDKEALRIDYPNFVTMHDAEIHRLESLPKTVTSMGVRRSHS

SEQ ID NO: 1769 - protein, 1338 aa, unidentified
  REGION 1..1338: note = Description of Unknown: uncultivated organism sequence
  REGION 1..1338: note = Category: MG81 effectors
  REGION 1..1338: note = Description: MG81-47 effector
MKFSKYEHKSAAVVLKNSAAEKRVSDNVEGILFPLQKETLDNYVEKRIDKVQEKYAVLVNAKISKKDKEEKTKEEAIKYFNEFMDYLFVKWHDREQGVSAKTAKNKEQLKKLVEKLVKFLRNKGRDNLYIGKRKTKIKDINLELSDESVHELVRTKIRGSLRKNFCYKVSGKTAVCYLPDVIGKLMKIVCVESDFVSGMRRIPKEELEKTFLIIATEYNKKIKEDNVVKSIQNQNVRVQVFYEEGEARLELANARHRKKKCIFDLQRRFALGDQNERKKILCELAKLIILFTAGTDVYHKIKNRDIPLWNFNFLDDVLTEETKIFHQECVDIINNRDQIQDKLKKQDEESIEKEKNIRKVNNFNKEIRKGIYQKIRSRYQEYKKLKGNELPDESEFWIEEIERDIEGMFLKDKKRWIRQEELDVKRMCGRLWEKRIEYLRSKYVDIGKGVYHFAMPDLHNLIEKKEIKIGEVQPEFQKGITSFDYERIKAEENLERSFIIYITFAVNNFARAVYPPTFYKKNGNEDILQIKDPETIRESRHGDAGRRIMQFFGGVSQWKEVLGISENIPSDYTEKLIVDIQKAMNQIRNVSFHYASSFPKRVYEEDSPLIKIFNKEREGLSKLYCEKIFSNNVPKFYKINDITKLMDHLYEDTKVDLEAQIPSFKKVLSPGKFIEQINDFVDKEAYENLNEKDIFHHALYYTLKQIYYNCFIKSENLKEKFIEALNEMKKNPQDDTEKWALNSLCKRIDEYEKNISFGNLCQRIMTDYALQNSEMKVQIDKDNSKTDKKYEHFIMLLYKGIRKIFISYYNGEWEGSGEKFDYDFLKKPEFNAEDKEISKEEFCAQWEKELYSDLASEKEGWIISWFIVAHFMTPTHVNHLRGEIKGYFGYVNGIENRRYNIMKKSRPIDEEIKKRYEKVLKVLNLASEYCGLVSAKWEDYYSDENDFAEDIRKYVQYENQEPDKSQQEQLKQFCSKTAADSPSGYINIYEAGGVPIVNRNIIHAKMYGTEKLLSKCFTDDRITEEEIRDFYKKRKELEELFRKGICKEKEEEESKRKYQQKKNRIELQDIQKYSDILNDLMSQLISWCYLRERDKMYFQLGLHYIRLYHDKEKKIVEESSKLRVLKRYDEDHAAEIQIISDGALLYQLAAIYTYELPIFEIQNRGMAKIVSSTQNGSMISASERVFRKKYLGENKSKNSLLEVGMELFENKKKEKFIREYRNYLDHFKYYARNDMSMMELYNKMFFLFFSNDIKLRKSVTVVFRNILARHFVLSKLVFCKESSIEGGKRFVLKDNLKSKTTTHKPEKNIEFEVDYYDEHFLKRLQKILEYKTKIMDEK

SEQ ID NO: 1770 - protein, 538 aa, unidentified
  REGION 1..538: note = Description of Unknown: uncultivated organism sequence
  REGION 1..538: note = Category: MG81 effectors
  REGION 1..538: note = Description: MG81-48 effector
MGLEFKKYDVVMVDFPERKCGSIQSGLRPAIIIQNDIGNQYSPTLLVIPLTTKIKSLNQPTHTLIKKAIGNGLDQDSMLLAEQTTAICKEHAKKIGEIRNETVKKQILTCFLNEANKLLKDAGISQFDFIKDISSLQKHFAPHIAQKVGAAAARSHVWSAFDKVVFGKGQRIHFHKKGDLKSITSGYFGISMTVKNGYFIWSGGTKDEKDRKVNPITISVKIKQPETYYEKEMLQKQIKYVTIVRKWIKNRYKYYLQFMLVGNPVVKPRVIANGKRVGIDIGPSSAAIVSEKEVKLVELADKVQKNHDKKTQLQRSMDRSRRAMNPQNFNKNGTIKRGIKLIWNESNHYKEMRGQVRELERKNADIRKYQHTCLANYVMSLGTEVYVEQMNFKGLQKRAKETKYDENGRPKRKKRFGKSIANRAPAMFITILNNKLFGIAGEELHKVNTFTFKASQYDHTNDTYKKKLLKDRWAELSNGDKIQRDLYSAFLIMNSDAEMQQADLRKCEETYKRFKEQHDGLIVKMKESNHIRLSSFGF

SEQ ID NO: 1771 - protein, 533 aa, unidentified
  REGION 1..533: note = Description of Unknown: uncultivated organism sequence
  REGION 1..533: note = Category: MG81 effectors
  REGION 1..533: note = Description: MG81-49 effector
MANNNNNNNNNNNNNTDTCVLTLPLRVEKWQEDCLLKRFEAARRIYNSLLNFELKKLRQLERTVEYRQIQSVISSAYRSNTKDSLECKDAFKRRKKLTDENGISEYGFKSDVKFFYKHFDGLIGSNVAVHCIAVQLWAAFDKYLRGSGKEIHFKRLGDISSLKGYSVKGKSGGCEIIFRGQYVEWTRKKKKLLLPLKIDPDNEYEREMLSRRVKYVRIIKKPGKNRLRWYAQLTLEGKPALKYSAGTGKPIHSVGKGNVGIDIGPQTVAYASDKEVALLELADRVTNIEHQKKKLQRKLDRSRRATNPDNYKPDGTIKRGVKLTRNKSKRYLKLQSKLAYIQHRQAEIRKLQHTCLANHMLTLGDRFFVEKMNWPGLAHRAKETSISEKTGRYKRKKRFGKSLANKAPAMFISILKRKCETLGLPGVVEVDTYNLKASQYNHLSDTYEKKSLSERWNYMPISDGSDSSKTKRIQRDLYSAFLLQHTIPQPCSFDKEALRIDYPNFVTMHDAEIHRLESLPKTVTSMGVRRSHS

SEQ ID NO: 1772 - protein, 561 aa, unidentified
  REGION 1..561: note = Description of Unknown: uncultivated organism sequence
  REGION 1..561: note = Category: MG81 effectors
  REGION 1..561: note = Description: MG81-50 effector
MNISRSHRIRLFPTKEQERFLQDCAFVARTAWNFGLSFLIESNRRVIADWNALSDAERLARDPALKPKKESKRKKKKTEVSDDKKKKQSKPKVEWASYTDDDRLKRAPTGWDSAPASAAWTQVKKTSASGQLRGAVIANAVPAMVGFNAFIDLNKAWNKYFKECGSKPCSRRKDDKNCWCKDFPAWMGCGHPRFKNRSSGKSFLLPGSDKSGCNAIFGVDGKHFVFTGNKYHQRITMAEELRFQGRVASARVFEDNRHWYASIQVMDITVPDPAAHAGPSVGVDLGVASTATLSTGEKIDNLHAARKNEPRIAKLNQAISLKSIWLPCPACAGEPDKKKECKRCSGAGQVQDRRAVTCEVCKGTGKDLEDESKRCRRCRGCGRQKSQRMIDLEAKITKLQQHAANQRNDHMHKATTRIVQTYSFIGLEDINFNEMKTQNAEKMTGEGKRKRGFQRSLTDACPGEFRRQLEYKAPAYGGRSVRIDKWSASSKICSACGERVDDLPMSVRTWTCPVCGVSHDRDINAAVNILRKALDEAKTTGEQSAVVKKPRCAKKELHDAR

SEQ ID NO: 1773 - protein, 512 aa, unidentified
  REGION 1..512: note = Description of Unknown: uncultivated organism sequence
  REGION 1..512: note = Category: MG81 effectors
  REGION 1..512: note = Description: MG81-51 effector
MPTKQKEDSNRCVLTLPLLTEPWQEHIIEKRFKIIEHLKNQLISIELRKLKNLQRTKAYKNLMKRIESVPKSERTALYKERNKMLKDAGFSQYTFMDDMAGKKSLMQKHFESHINVQIAHKAAIDVWSSFEKFLFGTGQIVHYQKRGTLSSVASKSPKTGMFYYPDENIFKWSGGGTKPKGGIILCLRVASVKTNYEKEMIANNEIKYYRVVRKWMKTKYKYYLQITFAGKPADKHREISTGRVGIDIGTQTIAIASDKSVKLLELADKVNKNHIKKCELQRKLDRSRRYTNPDNFNPDGTVKRGTKGHKLKWNKSKHYLEVAGKIRELERKNADIRKYQHTCLANDILAMGNQIYIEPMNYKGLQKRAKETQVDEKGRYKKKKRFGKSLANKAPAMFVTILKTKAEQHGGEVYEVDIMSYRASQCDHTTGEYTKHGLNDRWRILGNGDKVQRDLYSAFLIKNSNKTHDEIDLDKCSKTYDSFKKLHDKEIENIRNEVILRKRRNISSYGIA

SEQ ID NO: 1774 - protein, 512 aa, unidentified
  REGION 1..512: note = Description of Unknown: uncultivated organism sequence
  REGION 1..512: note = Category: MG81 effectors
  REGION 1..512: note = Description: MG81-52 effector
MPTKQKEGGNRCVLTLPLLTEPWQEHIIEKRFKIIEHLKNQLISIELRKLKNLQRTKAYKNLIKQIESVPKSERTVLYKKRNKMLKDAGFSQYTFMDDMAGKKSLMQKHFESHINVQIAHKAAIDVWSSFEKFLFGSGQMIHYQKRGTLSSVASKSPKTGMFYYSDENIFKWSGGGTKPKGGIILCLRVAPVKTNYEKEMVANNEIKYYRVVRKWMKTKYKYYLQITFAGKPADKHHEVSTDRVGIDIGTQTIAIASDKSVKLLELADKVNKNHIKKCELQRKLDRSRRYTNPDNFNPDGTVKRGTKGHKLKWNKSKHYIEIAGKIRELERKNADIRKYQHTCLANDILAMGNQIYIEPMNYKGLQKRVKETQVDEKGRYKKKKRFGKSLANKAPAMFVTILKTKAEQHGGEVYEVDIMSYRASQCDHTTGEYTKHGLNDRWRILGNGDKVQRDLYSAFLIKNSNKTHDEIDLDKCSKTYDNFKKLHDKEIENIRNEVILRERRNISSYGIA

SEQ ID NO: 1775 - protein, 512 aa, unidentified
  REGION 1..512: note = Description of Unknown: uncultivated organism sequence
  REGION 1..512: note = Category: MG81 effectors
  REGION 1..512: note = Description: MG81-53 effector
MPTKQKEDSNRCVLTLPLLTEPWQEHIIEKRFKIIEHLKNQLISIELRKLKNLQRTKAYKNLMKRIESVPKSERTALYKERNKMLEGKGFSQYTFMDDMAGKKSLMQKHFESHINVQIAHKAAIDVWSSFEKFLFGSGQMIHYQKRGTLSSVASKSPKTGMFYYPDENIFKWSGGGTKPKGGIILCLRVASVKTNYEKEMVANNEIKYYRVVRKWMKTKYKYYLQITFAGKPADKHREISTGRVGIDIGTQTIAIASDKSVKLLELADKVNKNYIKKCELQRKLDRSRRYTNPDNFNPDGTVKRGTKGHKLKWNKSKHYLEIAGKIRELERKNADIRKYQHTCLANDILAMGNQIYIEPMNYKGLQKRAKETQVDEKGRYKKKKRFGKSLANKAPAMFVTILKTKAEQHGGEVYEVDIMSYRASQCDHTTGEYTKHGLNDRWRILGNGDKVQRDLYSAFLIKNSNKTHDEIDLDKCSKTYDSFKKLHDKEIENIRNEVKLRERKNISSYGIA

SEQ ID NO: 1776 - protein, 512 aa, unidentified
  REGION 1..512: note = Description of Unknown: uncultivated organism sequence
  REGION 1..512: note = Category: MG81 effectors
  REGION 1..512: note = Description: MG81-54 effector
MPTKQKEGGNRCVLTLPLLTEPWQEHIIEKRFKIIEHLKNQLISIELRKLKNLQRTKAYKNLIKQIESVPKSERTALYKERNKMLKDAGFSQYTFMDDMAGKKSLMQKHFESHINVQIAHKAAIDVWSSFEKFLFGTGQIVHYQKRGTLSSVASKSPKTGMFYYSDENIFKWSGGGTKPKGGIILCLRVASVKTNYEKEMVANNEIKYYRVVRKWMKTKYKYYLQITFAGKPADKHREISTGRVGIDIGTQTIAIASDKTVKLLELADKVNKNHIKKCELQRKLDRSRRYTNPDNFNPDGTVKRGTKGHKLKWNKSKHYIEIAGKIRELERKNADIRKYQHTCLANDILAMGNQIYIEPMNYKGLQKRAKETQVDEKGRYKKKKRFGKSLANKAPAMFVTILKTKAEQHGGEVYEVDIMSYRASQCDHTTGEYTKHGLNDRWRILGNGDKVQRDLYSAFLIKNSNKTHDEIDLDKCSKTYDSFKKLHDKEIENIRNEVKLRERRNISSYGIA

SEQ ID NO: 1777 - protein, 512 aa, unidentified
  REGION 1..512: note = Description of Unknown: uncultivated organism sequence
  REGION 1..512: note = Category: MG81 effectors
  REGION 1..512: note = Description: MG81-55 effector
MPTKQKEGGNRCVLTLPLLTEPWQEHIIEKRFKIIEHLKNQLISIELRKLKKLQRTKAYKNLIKQIESVPKSERTALYKERNKMLKDAGFSQYTFMDDMAGKKSLMQKHFESHINVQIAHKAAIDVWSSFEKFLFGTGQIVHYQKRGTLSSVASKSPKTGMFYYSDENIFKWSGGGTKPKGGIILCLRVASVKTNYEKEMVANNEIKYYRVVRKWMKTKYKYYLQITFAGKPADKHREISTGRVGIDIGTQTIAIASDKSVKLLELADKVNKNHIKKCELQRKLDRSRRYTNPDNFNPDGTVKRGTKGHKLKWNKSKHYIEIAGKIRELERKNADIRKYQHTCLANDILAMGNQIYIEPMNYKGLQKRAKETQVDEKGRYKKKKRFGKSLANKAPAMFVTILKTKAEQHGGEVYEVDIMSYRASQCDHTTGEYTKHGLNDRWRILGNGDKVQRDLYSAFLIKNSNKTHDEIDLDKCSKTYDNFKKLHDKEIENIRNEVILRERKNISSYGIA

SEQ ID NO: 1778 - protein, 512 aa, unidentified
  REGION 1..512: note = Description of Unknown: uncultivated organism sequence
  REGION 1..512: note = Category: MG81 effectors
  REGION 1..512: note = Description: MG81-56 effector
MKKSSTDTCCLTLPLKLEKWQEDRLAKRFEIARQLYNTLVHAELKRLVQIKRTAEYLENEQKIRALDRNNPADRAKLQELYKEQRKSLKTAGFTDYSFTTDMGKYYKHFRDNIGSSVAVHGIAPQVWAAFDKVLFKKGGKKVHYKRPGEVNSVQGYSRTGKSGGTEIMFRGPYIEWKGLKLPLKLSPDNAYETDMLQRRVKLVRLVRRPGKRRDRWYAQLVLEAKPAIKADPVTGKAVHPIGSGPVGLDIGPQTLAYSAAGAAGLVELADRVQNIEQEKRRLQRKMDRSRRAANPDNYAEDGTIRRGVKLTHNKSKRYRRSQQELKYLQHRQAEIRKLQHIQLANHLLSLGDHFYVEKMEWSSLTHRAKETVISEKTGKPRSKRRFGKSIANKAPAMLIEILRQKCKSLGLSDVVEINPADIKASQYNHLTGKYVKKSLSRRWNDMQDGEHLQRDLYSAFLLQHYDSCSKTLDLDSLARDYPAFVQYHHREIERLHALPKTPSSMGIRRSIA

SEQ ID NO: 1779 - protein, 512 aa, unidentified
  REGION 1..512: note = Description of Unknown: uncultivated organism sequence
  REGION 1..512: note = Category: MG81 effectors
  REGION 1..512: note = Description: MG81-57 effector
MPAKQKEGSNRCVLTLPLLTEPWQEHIIEKRFKIIEHLKNQLISIELRKLKNLQRTKAYKNLMKRIESVPKSERTALYKERNKMLKDAGFSQYTFMDDMAGKKSLMQKHFESHINVQIAHKAAIDVWSSFEKFLFGTGQIVHYQKRGTLSSVASKSPKTGMFYYSDENIFKWSGGGTKPKGGIILCLRVAPVKTNYEKEMVANNEIKYYRVVRKWMKTKYKYYLQITFAGKPADKHHEVSTGRVGIDIGTQTIAIASDKSVKLLELADKVNKNHIKKCELQRKLDRSRRYTNPDNFNPDGTVKRGTKGHKLKWNKSKHYIEIAGKIRELERKNADIRKYQHTCLANDILAMGNQIYIEPMNYKGLQKRAKETQVDEKGRYKKKKRFGKSLANKAPAMFVTILKTKAEQHGGEVYEVDIMSYRASQCDHTTGEYTKHGLNDRWRILGNGDKVQRDLYSAFLIKNSNKTHDEIDLDKCSKTYDNFKKLHDKEIENIRNEVKLRERRNISSYGIA

SEQ ID NO: 1780 - protein, 512 aa, unidentified
  REGION 1..512: note = Description of Unknown: uncultivated organism sequence
  REGION 1..512: note = Category: MG81 effectors
  REGION 1..512: note = Description: MG81-58 effector
MPTKQKEDSNRCVLTLPLLTEPWQEHIIEKRFKIIEHLKNQLISIELRKLKKLQRTKAYKNLIKQIESVPKSERTALYKERNKMLKDAGFSQYTFMDDMAGKKSLMQKHFESHINVQIAHKAAIDVWSSFEKFLFGTGQIVHYQKRGTLSSVASKSPKTGMFYYPDENIFKWSGGGTKPKGGIILCLRVASVKTNYEKEMVANNEIKYYRVVRKWMKTKYKYYLQITFAGKPADKHREISTGRVGIDIGTQTIAIASDKSVKLLELADKVNKNHIKKCELQRKLDRSRRYTNPDNFNPDGTVKRGTKGHKLKWNKSKHYLEIAGKIRELERKNADIRKYQHTCLANDILAMGNQIYIEPMNYKGLQKRAKETQVDEKGRYKKKKRFGKSLANKAPAMFVTILKTKAEQHGGEVYEVDIMSYRASQCDHTTGEYTKHGLNDRWRILGNGDKVQRDLYSAFLIKNSNKTHDEIDLDKCSKTYDSFKKLHDKEIENIRNEVILRKRRNISSYGIA

SEQ ID NO: 1781 - protein, 512 aa, unidentified
  REGION 1..512: note = Description of Unknown: uncultivated organism sequence
  REGION 1..512: note = Category: MG81 effectors
  REGION 1..512: note = Description: MG81-59 effector
MPTKQKEDSNRCVLTLPLLTEPWQEHIIEKRFKIIEHLKNQLISIELKKLKNLQRTKAYKNLIKQIESVPKSERTALYKERNKMLKDAGFSQYTFMDDMAGKKSLMQKHFESHINVQIAHKAAIDVWSSFEKFLFGTGQMIHYQKRGTLSSVASKSPKTGMFYYSDENIFKWSGGGTKPKGGIILCLRVASVKTNYEKEMVANNEIKYYRVVRKWMKTKYKYYLQITFAGKPADKHREISTGRVGIDIGTQTIAIASDKSVKLLELADEVNKNHIKKCELQRKLDRSRRYTNPDNFNPDGTVKRGTKGYKLKWNKSKHYIEIAGKIRELERKNADIRKYQHTCLANDILAMGNQIYIEPMNYKGLQKRAKETQVDEKGRYKKKKRFGKSLANKAPAMFVTILKTKAEQHGGEVYEVDIMSYRASQCDHTTGEYTKHGLNDRWRILGNGDKVQRDLYSAFLIKNSNKTHDEIDLDKCSKTYDNFKKLHDKEIENIRNEVILRKRRNISSYGIA

SEQ ID NO: 1782 - protein, 185 aa, unidentified
  REGION 1..185: note = Description of Unknown: uncultivated organism sequence
  REGION 1..185: note = Category: MG81 effectors
  REGION 1..185: note = Description: MG81-60 effector
MKNKYKRTGTTVSIQQHNELANRLLSFGSEHYIEEMRFRALAKQAKETKFNSKGRPVRKKRFGKSIFNKAPALFAKTIKRKVLNAGGSFQRVDTFSVKASQFNHLTETYTKKSLGKRWNTMPDGTKVQRDLYSAFLIQNVDDSLKQVDVERCNQSYDSFLALHDREIRRLSYLLTPNSMGAQHSA

SEQ ID NO: 1783 - protein, 512 aa, unidentified
  REGION 1..512: note = Description of Unknown: uncultivated organism sequence
  REGION 1..512: note = Category: MG81 effectors
  REGION 1..512: note = Description: MG81-61 effector
MPTKQKEDSNRCVLTLPLLTEPWQEHIIEKRFKIIEHLKNQLISIELRKLKNLQRTKAYKNLIKQIESVPKSERTVLYKERNKMLKDAGFSQYTFMDDMAGKKSLMQKHFESHINVQIAHKAAIDVWSSFEKFLFGTGQMIHYQKRGTLSSVASKSPKTGMFYYSDENIFKWSGGGTKPKGGIILCLRVASVKTNYEKEMVANNEIKYYRVVRKWMKTKYKYYLQITFAGKPADKHREISTGRVGIDIGTQTIAIASDKSVKLLELADKVNKNHIKKCELQRKLDRSRRYTNPDNFNPDGTVKRGTKGHKLKWNKSKHYLEIAGKIRELERKNADIRKYQHTCLANDILAMGNQIYIEPMNYKGLQKRAKETQVDEKGRYKKKKRFGKSLANKAPAMFVTILKTKVEQHGGEVYEVDIMSYRASQCDHTTGEYTKHGLNDRWRILGNGDKVQRDLYSAFLIKNSNKTHDEIDLDKCSKTYDSFKKLHDKEIENIRNEVKLRERRNISSYGIA

SEQ ID NO: 1784 - protein, 511 aa, unidentified
  REGION 1..511: note = Description of Unknown: uncultivated organism sequence
  REGION 1..511: note = Category: MG81 effectors
  REGION 1..511: note = Description: MG81-62 effector
MAKCSTDTCCLTLPLRLEKWQEDRLAKRFEIARRIYNTMVRAELKKLRAIEQSEPYKANQEKIQALDWKTQADKQALKALYKERDKLLRDGGFSERGFKSDIKNYYKHFNNNIGSNVAAHGIAPQVWAAFEKMLFKKEGKKVHFKKKGDIRSLRGYSVTGKSGGVEIIFRETYIEWKGLKLPLKLSPDNIYETQMLSYRVKYVRLLRKPGKRKDRWYAQLSLEGKPVIKYNPKTGEVRHPIGKGAVGLDIGPQTLAYSAATGADLVELANQVQNVEQEKRRLQRKLDRSRRATNPGNYADDGTIRRGIALTHNKSKRYLRTQQELKYLQHQQAEIRKRQHTELANHLLSLGDCFYVEKMVWTSLTHRAKETEISEKTGKIKRKKRFGKSVANKAPATLIGILQLKSAALGIPGVIEVPTSVKASQYNHQSGTYTPKPLSQRWNNMPDGERIQRDLYSAFLLQHYDPQTNTFDANSLHQDYPQFVQYHHDAVLRLYAMPKTPSSMGIKRSLR

SEQ ID NO: 1785 - protein, 511 aa, unidentified
  REGION 1..511: note = Description of Unknown: uncultivated organism sequence
  REGION 1..511: note = Category: MG81 effectors
  REGION 1..511: note = Description: MG81-63 effector
MGKSSTDTCCLTLPLKLEKWQEDRLAKRFEIARQIYNTMVRAELKRLRQVEQSPQYRSNKKAIQALDWKNTADKPKLKTLYRERDKLLKGGGFTEYGFKSDIKNFYKHFAENIGSSVAVHGIAPQVWAAFERVLFKKEGKKVHFKKTGDIRSLRGYSVTGKSGGVEIIFRGSYIEWKGLDLPLKLSPDNAYETEMLSYRVKYVRILRKPGKTRDRWYAQLSLEGKPAIKRNPASGNPVHPVGQGAVGLDIGPQTLAYAAEKEANLVELADRVQNIEREKHLLQRKMDRSRRAANPDNYAENGTIRRGVKLTHNKSKRYLRLQRELCYLQHCQAETRKRQHTELANHLLSLGSCFYVEDMAWPSLTHRAKKTEISDKTGRIKRKKRFGKSIANKAPAALINILRTKCVSLGIPGVVEVPTSLKASQYNHQSKEYTPKPLSQRWNDMPDGSRIQRDLYSAFLLQHYDPQSGNFDQASLEADYPQFVQLHNQSIQRLLTVPKTPSSMGIRRSVS

SEQ ID NO: 1786 - protein, 525 aa, unidentified
  REGION 1..525: note = Description of Unknown: uncultivated organism sequence
  REGION 1..525: note = Category: MG81 effectors
  REGION 1..525: note = Description: MG81-64 effector
MAKNNNDTDTCVLTLPLRVEKWQEDCLLKRFEAARRIYNSLLNFELKKLRQLERTVEYRQIQSVISSAYRSNTKDSPECKDAFKRREKLISANGISENGFKSDVKFFYKHFDGLIGSSVAVHCIAVQLWAAFDKYLSGSGKEIHFKRLGDISSLKGYSVKGKSGGREIIFRGQYIEWTRKKKKLLLPLKIDPDNEYEREMLSRRVKYVRIIKKPGKNRLRWYAQLTLEGKPALKYSAETGKPIHSVGKGNVGIDIGPQTVAYASDKEVALLELADRVTNIEHQKKKLQRKLDRSRRATNPDNYKPDGTIKRGVKLTRNKSKRYLKLQSKLAYIQHRQAEIRKLQHTCLANHMLTLGDRFFVEKMNWPGLAHRAKETSISEKTGRYKRKKRFGKSLANKAPAMFISILKRKCETLGLPGVVEVDTFRLRASQYNHLSDTYEKKSLSERWNYMPISDGSDSSKTKRIQRDLYSAFLLQHTIPQPCSFDKEALRIDYPNFVTMHDAEIHRLESLPKTVTSMDVRRSHS

SEQ ID NO: 1787 - protein, 512 aa, unidentified
  REGION 1..512: note = Description of Unknown: uncultivated organism sequence
  REGION 1..512: note = Category: MG81 effectors
  REGION 1..512: note = Description: MG81-65 effector
MPTKQKEGGNRCVLTLPLLTEPWQEHIIEKRFKIIEHLKNQLISIELRKLKNLQRTKAYKNLIKQIESVPKSERTALYKERNKMLKDAGFSQYTFMDDMAGKKSLMQKHFEGHINVQIAHKAAIDVWSSFEKFLFGTGQIVHYQKRGTLSSVASKSPKTGMFYYSDENIFKWSGGGTKPKGGIILCLRVASVKTNYEKEMVANNEIKYYRVVRKWMKTKYKYYLQITFAGKPADKHREISTGRVGIDIGTQTIAIASDKSVKLLELADKVNKNHIKKCELQRKLDRSRRYTNPDNFNPDGTVKRGTKGHKLKWNKSKHYIEIAGKIRELERKNADIRKYQHTCLANDILAMGNQIYIEPMNYKGLQKRAKETQVDEKGRYKKKKRFGKSLANKAPAMFVTILKTKAEQHGGEVYEVDIMSYRASQCDHTTGEYTKHGLNDRWRILGNGDKVQRDLYSAFLIKNSNKTHDEIDLDKCSKTYDNFKKLHDKEIENIRNEVKLRERKNISSYGIA

SEQ ID NO: 1788 - protein, 523 aa, unidentified
  REGION 1..523: note = Description of Unknown: uncultivated organism sequence
  REGION 1..523: note = Category: MG81 effectors
  REGION 1..523: note = Description: MG81-66 effector
MPTKQKEGGNRCVLTLPLLTEPWQEHIIEKRFKIIEHLKNQLISIELRKLKNLQRTKAYKNLIKQIESVPKSERTVLYKERNKMLKDAGFSQYTFMDDMAGKKSLMQKHFESHINVQIAHKAAIDVWSSFEKFLFGSGQMIHYQKRGTLKSIASKSPKNGMHYFPESNTFKWSGGKQKKIGQKGEQKKVSIKPISLCLRVSPLKTDYEKEMVANNEIKYYRVVRKWMKTKYKYYLQITFAGKPADKHREISTGRVGIDIGTQTIAIASDKSVKLLELADKVNKNHIKKCELQRKLDRSRRYTNPDNFNPDGTVRRGTKGHKLKWNKSKHYLEIAGKIRELERKNSDIRKYQHTCLANDILAMGNQIYIEPMNYKGLQKRAKETQVDEKGRYKKKKRFGKSLANKAPSMFVTILKTKAEQHGGEVYEVDIMSYRASQCDHTTGEYTKHGLNDRWRILGNGDKVQRDLYSAFLIKNSNKTHDEIDLDKCSKTYDNFKKLHDTEIENIRNEVKLRERKNISSYGIA

SEQ ID NO: 1789 - protein, 511 aa, unidentified
  REGION 1..511: note = Description of Unknown: uncultivated organism sequence
  REGION 1..511: note = Category: MG81 effectors
  REGION 1..511: note = Description: MG81-67 effector
MREDSQNTCCLTLPLKIEKWQADRLIKRFEIARQIYNTLVHAELKKLQKMEASAEYRQIQDRIRELNPSDVRAKKEWKILKDKQEKLWKAWKITEYGFKSDIKAYYKYFNENIGSAVATHDIAPRVWAAFEKKLNDRTGKVKIQYKKAGDIRSLKGFSVSGKSGGTEIIFHKTYIAWKGLTLPLKLSPDNAYEKEMLMRRIKYVRILRKPGKHKDRWYAQLSLEGNPVVKLDPVSGLPRHPIGKGAVGIDIGPQTLAYSAEGGADLVELADQVQCIEQEKSRLQRKMDRSRRASNPDNYAQDGTIKRGVKLTHNKSRRYCKLQKELAYMLYRQAETRKRQHRELINRLLTMGDCFYIEDMHWNSLAHRAKKTEISEKTGRYKRKKRFGKSIANKAPAMLVDMLEQKCKSLELDVVMVNTSLKASQYNHQTGKYEKKTLSQRWNYMPDGEQIQRDLYSAFLLQHVVPEKNAFDNEALCRDYPKFVQYHHEVIERLRSLPKTISSMGIRQSVS

SEQ ID NO: 1790 - protein, 511 aa, unidentified
  REGION 1..511: note = Description of Unknown: uncultivated organism sequence
  REGION 1..511: note = Category: MG81 effectors
  REGION 1..511: note = Description: MG81-68 effector
MAKCSTDTCCLTLPLRLEKWQEDRLAKRFEIARQIYNTMVRAELKKLRAMEQSEPYKANQEKIQALDWKTQTDKQALKALYKERDKLLRDGGFSEYGFKSDIKNYYKHFNNNIGSNVAFHGIAPQVWAAFEKMLFKKEGKKVHFKKKGDIHSLRGYSAAGKSGGVEIIFRETYIEWKGLKLPLKLSPDNIYETQMLSYRVKYVRLLRKPGKRKDRWYAQLSLEGKPVIKYNPKTGEVRHPIGKGAVGLDIGPQTLAYSAATGADLVELANQVQNVEQEKRRLQRKLDRSRRATNPGNYADDGTIRRGIALTHNKSKRYLRTQQELKYLQHQQAEIRKRQHTELANHLLSLGDCFYVEKMVWTSLTHRAKETEISEKTGKIKRKKRFGKSVANKAPATLIGILQRKSAALGIPGVIEVPTSVKASQYNHQSGTYTPKPLSQRWNNMPDGERIQRDLYSAFLLQHYDPQTNTFDANSLHQDYPQFVQYHHDAVLRLYAMPKTPSSMGIKRSLR

SEQ ID NO: 1791 - protein, 523 aa, unidentified
  REGION 1..523: note = Description of Unknown: uncultivated organism sequence
  REGION 1..523: note = Category: MG81 effectors
  REGION 1..523: note = Description: MG81-69 effector
MPTKQKEGGNRCVLTLPLLTEPWQEHIIEKRFKIIEHLKNQLISIELRKLKNLQRTKAYKNLIKQIESVPKSERTALYKERNKMLKDAGFSQYTFMDDMAGKKSLMQKHFESHINVQIAHKAAIDVWSSFEKFLFGSGQMIHYQKRGTLKSIASKSPKNGMHYFPESNTFKWSGGKQKKIGQKGEQKKVSIKPISLCLRVSPLKTDYEKEMVANNEIKYYRVVRKWMKTKYKYYLQITFAGKPADKHREISTGRVGIDIGTQTIAIASDKSVKLLELADKVNKNHIKKCELQRKLDRSRRYTNPDNFNPDGTVRRGTKGHKLKWNKSKHYLEIAGKIRELERKNSDIRKYQHTCLANDILAMGNQIYIEPMNYKGLQKRAKETQVDEKGRYKKKKRFGKSLANKAPSMFVTILKTKAEQHGGEVYEVDIMSYRASQCDHTTGEYTKHGLNDRWRILGNGDKVQRDLYSAFLIKNSNKTHDEIDLDKCSKTYDNFKKLHDKEIENIRNEVKLRERRNISSYGIA

SEQ ID NO: 1792 - protein, 529 aa, unidentified
  REGION 1..529: note = Description of Unknown: uncultivated organism sequence
  REGION 1..529: note = Category: MG81 effectors
  REGION 1..529: note = Description: MG81-70 effector
MILLAKKNNNDTDTCVLTLPLRVEKWQEDCLLKRFEAARRIYNSLLNFELKKLRQLERTVEYRQIQSVISSAYRSNTKDSPECKDAFKRREKLISANGISEYGFKSDVKFFYKHFDGLIGSSVAVHCIAVQLWAAFDKYLSGSGKEIHFKRLGDISSLKGYSVKGKSGGREIIFRGQYIEWTRKKKKLLLPLKIDPDNEYEREMLSRRVKYVRIIKKPGKNRLRWYAQLTLEGKPALKYSAGTGKPIHSVGKGDVGIDIGPQTVAYASDKEVALLELADRVTNIEHQKKKLQRKLDRSRRATNPDNYKPDGTIKRGVKLTHNKSKRYLKLQSKLAYIQHRQAEIRKLQHTCLANHMLTLGDRFFVEKMNWPGLAHRAKETSISEKTGRYKRKKRFGKSLANKAPAMFISILKRKCETLGLPGVVEVDTYSLKASQYNHLSDTYEKKSLSERWNYMPISDGSDSSKTKRIQRDLYSAFLLQHTIPQPCSFDKEALRIDYPNFVTMHDAEIHRLGSLPKTITSMGVRRSHS

SEQ ID NO: 1793 - protein, 512 aa, unidentified
  REGION 1..512: note = Description of Unknown: uncultivated organism sequence
  REGION 1..512: note = Category: MG81 effectors
  REGION 1..512: note = Description: MG81-71 effector
MKKSSTDTCCLTLPLKLEKWQEDRLAKRFEIARQLYNTLVHAELKRLAQVKQTAEYRENERKIRTLDWNDPGDQAKLKGLYKERRKSLKTAGFTDYSFTTDMGKYYKHFRDNIGSSVAVHGIAPQVWAAFDKLLFKKGGKKVHYKKPGEVNSVQGYSRTGKSGGTEIMFRGPYIEWKGLKLPLKLSPDNAYETDMLQRRVKLVRLVRRPGKRRDRWYAQLVLEGKPAIKADPVTGKAVHPIGSGPVGLDIGPQTLAYSAAGAAGLVELADRVQNIEQEKRCLQRKMGRSRRATNPDNYAEDGTIRRGVKLTHNKSKRYRRSQQELKYLQRRQAEIRKLQHIQLANHLLSLGDHFYVEKMEWSSLTHRAKKTVISEKTGKPRSKKRFGKSIANKAPAMLIEILRQKCKSLGLPNVVEINPADIKASQYNHLTGEYVKKSLSRRWNEMQDGEHLQRDLYSAFLLQHYDSMSKALDLDSLARDYPAFVQYHHREIERLHALPKTPASMGIRRSIA

SEQ ID NO: 1794 - protein, 1362 aa, unidentified
  REGION 1..1362: note = Description of Unknown: uncultivated organism sequence
  REGION 1..1362: note = Category: MG81 effectors
  REGION 1..1362: note = Description: MG81-72 effector
MKISKIKNSRPGISVTENKNEEQLSRQSLLYYAPVKDGKIRLESKDLEQHVTECNEKAQKLYNVITPEINFYRDENRQKMVENLARNFNAVINNALRSIRNPKEKKERRVEKEVAFILNLSKKSIKLKENVFVKSTDLIVKFPENNKYNKKNSKGTGSKEAYIQKMISDLVLRKLKNTLRKEVKLENGCRMQMTEITISLMSAICLYGNAESFDPAILKAFFEKVDSDYTKYKYVEQIVKSIESQSAKLKVVEKDGRHLLISANADHRKKKYVFEFMRMYAAADEKEKRELTEHIQDLIGLYLCGKAGYENAENRFSDMIESHNCICGKIEEILNELEEPENLSQQKKEKLKNTTVKVMALKYRAAVNYLADEVGKTVLGEIREKKVRSCADLYWIEYIDSTVEKLLLKSRNKDGYRYEIGFLSKHIWKEWTQYISGKYIEMGKGVYHFAIPDLSGALEGESVSICEVKPEYRNGVSGFDYERIRAEESLEREMEKYVLFAVNNFARAVTPEEEREKSGHEDVLLMKTLSEIEESQTKEERQKKHDNNVKNAITLYADADRRILQFFGGQSRFREKEDSLINLYSGEDLYKEIRKELYAIRNITFHYTTKAEKDQTQKHDLAEYLFEEEFSDITELFREKYYANNVWKYYDAEVINTIMENIYCGRKYRAAQVPAFKNIISRPELPQVMNGFVKGNSLRRLMNCPDRDVINKYWSALFFVLKELYYYDFLQEQKRPEDNVKERFFRAIKKLSGQEKGDKEQKAWESFENRIDQIGRDRSFGAICQGLMIEYMLQNSDISMVQTETDNGKANNKKQIYKHYRTLLYNCISEAFIEYLREKWKELRTPVLTAKEWSKEEFCRADGLKHLSLFDHLKETFNDAESGSSWYMAAHFINQKYLNHLLGSIRNYLQFTEDIEDRAISLGDCVDNKREEKNLRYRNTLEILEFVAQFCERTTNVMEDYFESNQEYAEYLSGFVDYNTTKKETDIEKALYSFCKQKFKVDGKEYMAGIYYDGENLIPNRNIIRANMYGTTSCLKPCMDRITLKEIRTMYADQNKLDLVLKEGVCHTEEEQKAYREYQNEKNRIELFDVCTYTQILNDMQARLIGWSYMRERDLMYYQLGYYYTKLFWTDSISEEDARRRLVGNLVNVEDGAILYQILAFNSYNLPIIANKNNTVTLLKDEGSIGGKAITAFFKNYENAEMIYEEALDLFENMDEHAAIINTRNYIEHFKYFIKSDRSMMDLYSEIYDRFFRHDHNRKKNVPDSLKNVLADNFMIVDIDMELGSKKVGEKKKGFREHKAARIEFTDSGIRSTDMTYTIKPDIKDNKKDNKKDKKVLVPARSEVFLKQFRKILEYRIQDKTQ

SEQ ID NO: 1795 - protein, 512 aa, unidentified
  REGION 1..512: note = Description of Unknown: uncultivated organism sequence
  REGION 1..512: note = Category: MG81 effectors
  REGION 1..512: note = Description: MG81-73 effector
MPTKQKEDSNRCVLTLPLLTELWQEHIIEKRFKIIEHLKNQLISKELRKLKNLQRTKAYKNLMKRIESVPKSERTALYKERNKMLKDAGFSQYAFMDDMAGKKSLMQKHFESHINVQIAHKAAIDVWSSFEKFLFGTGQIVHYQKRGTLSSIASKSPKTGMFYYSDENIFKWSGGGTKPKGGIILCLRVASVKTNYEKEMVANNEIKYYRVVRKWMKTKYKYYLQITFAGKPADKHREISTGRVGIDIGTQTIAIASDKSVKLLELADKVNKNHIKKCELQRKLDRSRRYTNPDNFNPDGTVKRGTKGHKLKWNKSKHYIEIAGKIRELERKNADIRKYQHTCLANDILAMGNQIYIEPMNYKGLQKRAKETQVDEKGRYKKKKRFGKSLANKAPAMFVTILKTKAEQHGGEVYEVDIMSYRASQCDHTTGEYTKHGLNDRWRILGNGDKVQRDLYSAFLIKNSNKTHDEIDLDKCSKTYDNFKKLHDKEIENIRNEVKLRERKNISSYGIA

SEQ ID NO: 1796 - protein, 530 aa, unidentified
  REGION 1..530: note = Description of Unknown: uncultivated organism sequence
  REGION 1..530: note = Category: MG81 effectors
  REGION 1..530: note = Description: MG81-74 effector
MILLAKNNNNNNTDTCVLTLPLRVEKWQEDCLLKRFEAARRIYNSLLNFELKKLRQLERTVEYRQIQSVISSAYRSNTKDSPECKDAFKRREKLISANGISKNGFKSDVKFFYKHFDGLIGSSVAVHCIAVQLWAAFDKYLSGSGKEIHFKRLGDISSLKGYSVKGKSGGCEIIFRGQYVEWTRKKKKLLLPLKIDPDNEYEREMLSRRVKYVRIIKKPGKNRLRWYAQLTLEGKPALKYSAETGKPIHSVGKGNVGIDIGPQTVAYASDKEVALLELADRVTNIEHQKKKLQRKLDRSRRATNPDNYKPDGTIKRGVKLTRNKSKRYLKLQSKLAYIQHRQAEIRKLQHTCLANHMLTLGDRFFVEKMNWPGLAHRAKETSISEKTGRYKRKKRFGKSLANKAPAMFISILKRKCETLGLPGVVEVDTYNLKASQYNHLSDTCEKKSLSERWNYMPISDGSDSSKTKRIQRDLYSAFLLQHTIPQPCSFDKEALRIDYPNFVIMHDAEIHRLESLPKTITSMGVRRSHS

SEQ ID NO: 1797 - protein, 528 aa, unidentified
  REGION 1..528: note = Description of Unknown: uncultivated organism sequence
  REGION 1..528: note = Category: MG81 effectors
  REGION 1..528: note = Description: MG81-75 effector
MILLTKNNNNTDTCVLTLPLRVEKWQEDCLLKRFEAARRIYNSLLNFELKKLRQLERTVEYRQIQSVISSAYRSNTKDSPECKDAFKRREKLISANGISEYGFKSDVKFFYKHFDGLIGSNVAVHCIAGQLWAAFDKYLRGSGKEIHFKRLGDISSLKGYSVKGKSGGCEIIFRGQYIEWTRKKKKLLLPLKIDPDNEYEREMLSRRVKYVRIIKKPGKNRLRWYAQLTLEGKPALKYSAETGKPIHSVGKGNVGIDIGPQTVAYASDKEVALLELADRVTNIEHQKKKLQRKLDRSRRATNPDNYKPDGTIKRGVKLTRNKSKRYLKLQSKLAYIQHRQAEIRKLQHTCLANHMLTLGDRFFVEKMNWPGLAHRAKETSISEKTGRYKRKKRFGKSLANKAPAMFISILKRKCETLGLPGVVEVDTYSLKASQYNHLSDTYEKKSLSERWNYMPISDGSDSSKTKRIQRDLYSAFLLQHTIPQPCSFDKKALRIDYPNFVTMHDAEIHRLESLPKTITSMGVRRSHS

SEQ ID NO: 1798 - protein, 512 aa, unidentified
  REGION 1..512: note = Description of Unknown: uncultivated organism sequence
  REGION 1..512: note = Category: MG81 effectors
  REGION 1..512: note = Description: MG81-76 effector
MPTKQKEGGNRCVLTLPLLTEPWQEHIIEKRFKIIEHLKNQLISIELRKLKNLQRTKAYKNLMKRIESVPKSERTALYKERNKMLKDAGFSQYTFMDDMAGKKSLMQKHFESHINVQIAHKAAIDVWSSFEKFLFGSGQMIHYQKRGTLSSVASKSPKTGMFYYSDENIFKWSGGGTKPKGGIILCLRVASVKTNYEKEMVANNEIKYYRVVRKWMKTKYKYYLQITFAGKPADKHREISTGRVGIDIGTQTIAIASDKSVKLLELADKVNKNHMKKCELQRKLDRSRRYTNPDNFNPDGTVKRGTKGHKLKWNKSKHYIEIAGKIRELERKNADIRKYQHTCLANDILTMGNQIYIEPMNYKGFQKRAKETQVDEKGRYKKKKRFGKSLANKAPAMFVTILKTKAEQHGGEVYEVDIMSYRASQCDHTTGEYTKHGLNDRWRILGNGDKVQRDLYSAFLIKNSNKTHDEIDLDKCSKTYDSFKKLHDKEIENIRNEVILRERRNISSYGIA

SEQ ID NO: 1799 - protein, 529 aa, unidentified
  REGION 1..529: note = Description of Unknown: uncultivated organism sequence
  REGION 1..529: note = Category: MG81 effectors
  REGION 1..529: note = Description: MG81-77 effector
MILLANNNNNNTDTCVLTLPLRVEKWQEDCLLKRFEAARRIYNSLLNFELKKLRQLERTVEYRQIQSVISSAYRSNTKDSPECKDAFKRREKLISANGISKNGFKSDVKFFYKHFDGLIGSSVAVHCIAVQLWAAFDKYLSGSGKEIHFKRLGDISSLKGYSVKGKSGGCEIIFRGQYVEWTRKKKKLLLPLKIDPDNEYEREMLSRRVKYVRIIKKPGKNRLRWYAQLTLEGKPALKYSAETGKPIHSVGKGNVGIDIGPQTVAYASDKEVALLELADRVTNIEHQKKKLQRKLDRSRRATNPDNYKPDGTIKRGVKLTRNKSKRYLKLQSKLAYIQHRQAEIRKLQHTCLANHMLTLGDRFFVEKMNWPGLAHRAKETSISEKTGRYKRKKRFGKSLANKAPAMFISILKRKCETLGLPGVVEVDTYNLKASQYNHLSDTCEKKSLSERWNYMPISDGSDSSKTKRIQRDLYSAFLLQHTIPQPCSFDKEALRIDYPNFVIMHDAEIHRLESLPKTITSMGVRRSHS

SEQ ID NO: 1800 - protein, 511 aa, unidentified
  REGION 1..511: note = Description of Unknown: uncultivated organism sequence
  REGION 1..511: note = Category: MG81 effectors
  REGION 1..511: note = Description: MG81-78 effector
MREDSQNTCCLTLPLKIEKWQADRLIKRFEIARQIYNTLVHAELKKLQKMEASAEYRQIQDRIRELNPSDARAKKEWKILKDKQEKLWKAWKITEYGFKSDIKAYYKYFNENIGSAVATHDIAPQVWAAFEKKLNDRTGKVKIQYKKAGDIRSLKGFSVSGKSGGTEIIFHKTYIAWKGLTLPLKLSPDNAYEKEMLMRRIKYVRILRKPGKHKDRWYAQLSLEGNPVVKLDPVSGLPRHPIGKGAVGIDIGPRTLAYSAEGGADLVELADQVQCIEQEKSRLQRKMDRSRRASNPDNYAQDGTIKRGVKLTHNKSRRYCKLQKELAYMLYRQAETRKRQHRELINRLLTMGDCFYIEDMHWNSLAHRAKKTEISEKTGGYKRKKRFGKSIANKAPAMLVDMLEQKCKSLELDVVMVNTSLKASQYNHQTGKYEKKTLSQRWNHMPDGEQIQRDLYSAFLLQHVVPEKNAFDNEALCRDYPKFVQYHHEVIERLRSLPKTISSMGIRRSVS

SEQ ID NO: 1801 - protein, 524 aa, unidentified
  REGION 1..524: note = Description of Unknown: uncultivated organism sequence
  REGION 1..524: note = Category: MG81 effectors
  REGION 1..524: note = Description: MG81-79 effector
MAKNNNTDTCVLTLPLRVEKWQEDCLLKRFEAARRIYNSLLNFELKKLRQLERTVEYRQIQSVISSAYRSNTKDSPECKDAFKRREKLISANGISEYGFKSDVKFFYKHFDGLIGSNVAVHCIAVQLWAAFDKYLRGSGKEIHFKRLGDISSLKGYSVKGKSDGREIIFRGQYIEWTRKKKKLLLPLKIDPDNEYEREMLSRRVKYVRIIKKPGKNRLRWYAQLTLEGKPALKYSAGTGKPIHSVGKGNVGIDIGPQTVAYASDKEVALLELADRVTNIEHQKKKLQRKLDRSRRATNPDNYKPDGTIKRGVKLTRNKSKRYLKLQSKLAYIQHRQAEIRKLQHTCLANHMLTLGDRFFVEKMNWPGLAHRAKETSISEKTGRYKRKKRFGKSLANKAPAMFISILKRKCETLGLPGVVEVDTYSLKASQYNHLSDTYEKKSLSERWNYMPISDGSDSSKTKRIQRDLYSAFLLQHTIPQPCSFDKEALRIDYPNFVTMHDAEIHRLESLPKTVTSMGVRRSHS

SEQ ID NO: 1802 - protein, 532 aa, unidentified
  REGION 1..532: note = Description of Unknown: uncultivated organism sequence
  REGION 1..532: note = Category: MG81 effectors
  REGION 1..532: note = Description: MG81-80 effector
MILLAKKNNNNNNNTDTCVLTLPLRVEKWQEDCLLKRFEAARRIYNSLLNFELKKLRQLERTVEYRQIQSVISSAYRSNTKDSPECKAALKRREKLIDENGLTKNGFKNDVKFFYKHFDGLIGSSVAVHCIAVQLWAAFNKYLCGNGKEIHFKRLGDISSLKGYSVKGKSGGCEIIFRGQYVEWTRKKKKLLLPLKIDPDNEYEREMLSRRVKYVRIIKKPGKNRLRWYAQLTLEGKPALKYSAETGKPIHSVGKGDVGIDIGPQTVAYASDKEVALLELADRVTNIEHQKKKLQRKLDRSRRATNPDNYKPDGTIKRGVKLTRNKSKRYLKLQSKLAYIQHRQAEIRKLQHTCLANHMLTLGDRFFVEKMNWPGLAHRAKETSISEKTGRYKRKKRFGKSLANKAPAMFISILKQKCETLGLPGVVEVDTFRLKASQYNHLSDTCEKKSLSERWNYMPISDGSDSSKTKRIQRDLYSAFLLQHTIPQSCSFDKEALRIDYPNFVTMHDAEIHRLESLPKTITSMGVRRSHS

SEQ ID NO: 1803 - protein, 512 aa, unidentified
  REGION 1..512: note = Description of Unknown: uncultivated organism sequence
  REGION 1..512: note = Category: MG81 effectors
  REGION 1..512: note = Description: MG81-81 effector
MKKSSTDTCCLTLPLKLEKWQEDRLAKRFEIARQLYNTLVHAELKRLVQIKRTAEYLENEQKIRALDRNNPADRAKLQELYKEQRKSLKTAGFTDYSFTTDMGKYYKHFRDNIGSSVAVHGIAPQVWAAFDKVLFKKGGKKVHYKKPGEVNSVQGYSRTGKSGGTEIMFRGPYIEWKGLKLPLKLSPDNAYETDMLQRRVKLVRLVRRPGKRRDRWYAQLVLEGKPAIKADPVTGKAVHPIGSGPVGLDIGPQTLAYSAAGVAGLVELADRVQNIEQEKRCLQRKMDRSRRAANPDNYAEDGTIRRGVKLTHNKSKRYRRSQQELKYLQHRQAEIRKLQHIQLANHLLSLGDHFYVEKMEWSSLTHRAKKTVISEKTGKPRSKKRFGKSIANKTPAMLIEILRQKCKSLGLLNVVEINPADIKASQYNHLTGEYVKKSLSRRWNEMQDGEHLQRDLYSAFLLQHYDSMSKALDLDSLARDYPAFVQYHHREIERLHALPKTPASMGIRRSIA

SEQ ID NO: 1804 - protein, 554 aa, unidentified
  REGION 1..554: note = Description of Unknown: uncultivated organism sequence
  REGION 1..554: note = Category: MG81 effectors
  REGION 1..554: note = Description: MG81-82 effector
MDNEEKKEDGATCCLTLPLKLEKWQSDHLEKRFEIARQLYNTLVHAELKRIHRIERMPEYREIERLIEATTDKKEKWALKNQKKQFLRKNGINRNTFTTDMKRLYKHFNDNIGSNVAQHGIVSQVLTAFEKVYIENQSGEVHFKKPGDLRSVQGYSQKESGGKEIMFRNGKIIWTQQENDDRKKSPKYQQRKKRQNYKGVKGIAREFPVVFSKNNPYEAEMLTKHVKFVRILRKDGKTKPHWYAQLVLEGKPAIKRDPASGAPKHPVGHGVVGIDIGTRTLAYSTDKEVNLLELADRVQNIEQEKRRLQRKMDRSRRAMNPENYNSDGTFKRGVKLTRNKSKRYRRIQHQLAMIQHHQADIRKQQHNELANYLLTLGDCFFVENMSYCDLVHRANKTEISEKTGRYKRKKRFGKSIANKAPAMLITMLKQKCQSRGLKGVKEVDTHVRASQYNHQTDTCIEKALENRWNVMPDGERIQRDLYSAFLLQHCKQGLPKYNRKELKKEFGEELYRVFDREALQRDYPQFVAYHHMTIQRLSELPHTIPSMGIRRIIS

SEQ ID NO: 1805 - protein, 512 aa, unidentified
  REGION 1..512: note = Description of Unknown: uncultivated organism sequence
  REGION 1..512: note = Category: MG81 effectors
  REGION 1..512: note = Description: MG81-83 effector
MPTKQKEDSNRCVLTLPLLTEPWQEHIIEKRFKIIEHLKNQLISIELRKLKNLQRTKAYKNLMKRIESVPKSERTALYKERNKMLKDAGFSQYTFMDDMAGKKSLMQKHFESHINVQIAHKAAIDVWSSFEKFLFGTGQIVHYQKRGTLSSVASKSPKTGMFYYSDENIFKWSGGGTKPKGGIILCLRVASVKTNYEKEMVANNEIKYYRVVRKWMKTKYKYYLQITFAGKPADKHREISTGRVGIDIGTQTIAIASDKSVKLLELVDKVNKNHIKKCELQRKLDRSRRYTNPDNFNPDGTVKRGTKGHKLKWNKSKHYLEIAGKIRELERKNTDIRKYQHTCLANDILAMGNQIYIEPMNYKGLQKRAKETQVDEKGRYKKKKRFGKSLANKAPAMFVTILKTKAEQHGGEVYEVDIMSYRASQCDHTTGEYTKHGLNDRWRILGNGDKVQRDLYSAFLIKNSNKTHDEIDLDKCSKTYDSFKKLHDKEIENIRNEVILRKRRNISSYGIA

SEQ ID NO: 1806 - protein, 512 aa, unidentified
  REGION 1..512: note = Description of Unknown: uncultivated organism sequence
  REGION 1..512: note = Category: MG81 effectors
  REGION 1..512: note = Description: MG81-84 effector
MPTKQKEGGNRCVLTLPLLTEPWQEHIIEKRFKIIEHLKNQLISIELRKLKNLQRTKAYKNLIKQIESVPKSERTALYKERNKMLKDAGFSQYTFMDDMAGKKSLMQKHFESHINVQIAHKAAIDVWSSFEKFLFGTGQIVHYQKRGTLSSVASKSPKTGMFYYSDENIFKWSGGGTKPKGGIILCLRVASVKTNYEKEMVANNEIKYYRVVRKWMKTKYKYYLQITFAGKPADKHREISTGRVGIDIGTQTIAIASDKSVKLLELADKVNKNHIKKCELQRKLDRSRQYTNPDNFNPDGTVGRGTKGHKLKWNKSKHYLEIAGKIRELERKNADIRKYQHSCLANDILAMGNQIYIEPMNYKGLQKRAKETQVDEKGRYKKKKRFGKSLANKAPAMFVTILKTKAEQHGGEVYEVDIMSYRASQCDHTTGEYTKHGLNDRWRILGNGDKVQRDLYSAFLIKNSNKTHDEIDLDKCSKTYDNFKKLHDKEIENIRNEVILRKRRNISSYGIA

SEQ ID NO: 1807 - protein, 505 aa, unidentified
  REGION 1..505: note = Description of Unknown: uncultivated organism sequence
  REGION 1..505: note = Category: MG81 effectors
  REGION 1..505: note = Description: MG81-85 effector
MGKEEDKEPRCVLTLPLYPEPWQVDIIEKRFHIMEHIENSLTAIELRKLKNVERAKKYKDVVAAIKEEKDDKKRSKLWKERNKLLKDAGINQFDFIKDVSLLQKHFASHIAQKVAAAAARTHVWSSFDRVVFGNGRKIHFHKKGDLKSITSGYFGVSMTVKNGYFIWSGGTKDEKDRKVNPITISIRIKQPETYYEKEMLQKQIKYVTIVRKWIKNKYKYYLQFMLVGNPVVKPRTIANGKRVGIDIGTSSAAIVSGKEIKLVELADHIQNNYDKEIQLQRSMDRSRRVMNPQNFNEDGTIKRGIKLIWIESKHYKEMKGQVRELERKNADIRKYQHTCLANYVLSLGTEVYIEQMSFKGLQRKVKETKYDKNGKPKRKKRFGKSIANRAPATFVMILKNKLSGIAGEELHKVNTFTFKASQYDHTNNTYQKKLLGHRWAKLSNGDKIQRDLYSAFLLMNSDTDMQYTDQNKCKRNYKKFKIQHDELIKAMQESSKRYPKSFGIN

SEQ ID NO: 1808 - protein, 538 aa, unidentified
  REGION 1..538: note = Description of Unknown: uncultivated organism sequence
  REGION 1..538: note = Category: MG81 effectors
  REGION 1..538: note = Description: MG81-86 effector
MNNEEKEKEGATCCLTLPLKLEKWQSDHLEKRFEIARQLYNTLVHAELKKKCQVERMPEYQEIMKMIDTASNQKEKWALEKKRKAFLEENGFSRNAFKADMEKYYKHFNDNIGANVALHGITAQVWIAFDKVFVDNYKQKGKVHFKKPGELCSVQGYSQKKSGGKEIMFREDRIIWNQQGNRDRKKVKREFLLKLSPNNPYEAEMLKRHVKFVRILRKDGKTKPHWYAQLVLEGKPAVKRDPISSAPKHPVGHGVVGIDIGTRTLAYSTDKEVNLLELADHVQNIEQEKRRLQRKMDRSRRATNPENYNPDGTFKRGVKLTRNKSKRYRRIQHQLAMIQHHQADIRKQQHNELANYLLTLGDCFFVENMSYCDLAHRANKTEISEKTGRYKRKKRFGKSIANKAPAMLITMLKQKCQSRGLEGVKEVDTHVCASQYNHQTDTCIKKALENRWNIMPDGERIQRDLYSAFLLQHCRRDLPEYNRKELQKEFGEELYRVFDREALQRDYPQFVAYHHMTIQRLSELPHTIPSMGIRRIIS

SEQ ID NO: 1809 - protein, 512 aa, unidentified
  REGION 1..512: note = Description of Unknown: uncultivated organism sequence
  REGION 1..512: note = Category: MG81 effectors
  REGION 1..512: note = Description: MG81-87 effector
MPTKQKEDSNRCVLTLPLLTEPWQEHIIEKRFKIIEHLKNQLISIELRKLKNLQRTKAYKNLIKQIESVPKSERTALYKERNKMLKDAGFSQYTFMDDMAGKKSLMQKHFESHINVQIAHKAAIDVWSSFEKFLFGSGQMIHYQKRGTLSSVASKSPKTGMFYYSDENIFKWSGGGTKPKGGIILCLRVASVKTNYEKEMVANNEIKYYRVVRKWMKTKYKYYLQITFAGKPADKHREISTGRVGIDIGTQTIAIASDKSVKLLELADKVNKNHIKKCELQRKLDRSRRYTNPDNFNPDGTVKRGTKGHKLKWNKSKHYIEIAGKIRELERKNADIRKYQHTCLANDILAMGNQIYIEPMNYKGLQKRAKETQVDEKGRYKKKKRFGKSLANKAPAMFVTILKTKAEQHGGEVYEVDIMSYRASQCDHTTGEYTKHGLNDRWRILGNGDKVQRDLYSAFLIKNSNKTHDEIDLDKCSKTYDNFKKLHDKEIENIRNEVILRKRRNISSYGIA

SEQ ID NO: 1810 - protein, 530 aa, unidentified
  REGION 1..530: note = Description of Unknown: uncultivated organism sequence
  REGION 1..530: note = Category: MG81 effectors
  REGION 1..530: note = Description: MG81-88 effector
MILLANNNNNNNTDTCVLTLPLRVEKWQEDCLLKRFEAARRIYNSLLNFELKKLRQLERTVEYRQIQSVISSAYRSNTKDSPECKAALKRREKLIDENGLTKNGFKNDVKFFYKHFDGLIGSSVAVHCIAVQLWAAFNKYLRGNGKEIHFKRLGDISSLKGYSVKGKSGGCEIIFRGQYVEWTRKKKKLLLPLKIDPDNEYEREMLSRRVKYVRIIKKPGKNRLRWYAQLTLEGKPALKYSAETGKPIHSVGKGDVGIDIGPQTVAYASDKEVALLELADRVTNIEHQKKKLQRKLDRSRRATNPDNYKPDGTIKRGVKLTRNKSKRYLKLQSKLAYIQHRQAEIRKLQHTCLANHMLTLGDRFFVEKMNWPGLAHRAKETSISEKTGRYKRKKRFGKSLANKAPAMFISILKQKCETLGLPGVVEVDTFRLKASQYNHLSDTCEKKSLSERWNYMPISDGSDSSKTKRIQRDLYSAFLLQHTIPQSCSFDKEALRIDYPNFVTMHDAEIHRLESLPKTITSMGVRRSHS

SEQ ID NO: 1811 - protein, 528 aa, unidentified
  REGION 1..528: note = Description of Unknown: uncultivated organism sequence
  REGION 1..528: note = Category: MG81 effectors
  REGION 1..528: note = Description: MG81-89 effector
MILLANNNNNTDTCVLTLPLRVEKWQEDCLLKRFEAARRIYNSLLNFELKKLRQLERTVEYRQIQSVISSAYRSNTKDSLECKDAFKRRKKLTDENGISEYGFKSDVKFFYKHFDGLIGSNVAVHCIAVQLWAAFDKYLRGSGKEIHFKRLGDISSLKGYSVKGKSGGCEIIFRGQYVEWTRKKKKLLLPLKIDPDNEYEREMLSKRVKYVRIIKKPGKNRLRWYAQLTLEGKPALKYSAETGKPIHSVGKGNVGIDIGPQTVAYASDKEVALLELADRVTNIEHQKKKLQRKLDRSRRATNPDNYKPDGTIKRGVKLTRNKSKRYLKLQSKLAYIQHRQAEIRKLQHTCLANHMLTLGDRFFVEKMNWPGLAHRAKETSISEKTGRYKRKKRFGKSLANKAPAMFISILKRKCETLGLPGVVEVDTYSLKASQYNHLSDTYEKKSLSERWNYMPISDGSDSSKTKRIQRDLYSAFLLQHTIPHPCSFDKEALRIDYPNFVIMHDAEIHRLEFLPKTVTSMGVRRSHS

SEQ ID NO: 1812 - protein, 505 aa, unidentified
  REGION 1..505: note = Description of Unknown: uncultivated organism sequence
  REGION 1..505: note = Category: MG81 effectors
  REGION 1..505: note = Description: MG81-90 effector
MGKEEDKEPRCVLTLPLYPEPWQVDIIEKRFHIMERIENSLTAIELRKLKNVERAKKYKDVVAGIKEEKDDKKRSKLWKERNKLLKDAGINQFDFIKDVSLLQKHFASHIAQKVAAAAARTHVWSSFDRVVFGNGRKIHFHKKGDLKSITSGYFGVSMTVKNGYFIWSGGTKDEKDRKVNPITISIRIKQPETYYEKEMLQKQIKYVTIVRKRIKNRYKYYLQFMLVGNPVAKPRTIANGKRVGIDIGTSSAAIVSGKEIKLVELADHIQNNYDKEIQLQRSMDRSRRAMNPQNFNEDGTIKRGIKLIWIESKHYKEMKGQVRELERKNADIRKYQHTCLANYVLSLGTEVYIEQMSFKGLQRKVKETKYDKNGKPKRKKRFGKSIANRAPATFVMILKNKLSGIAGEELHKVNTFTFKASQYDHTNNTYQKKLLGHRWAKLSNGDKIQRDLYSAFLLMNSDTDMQYTDQNKCKRNYKKFKIQHDELIKAMQESSKRYPKSFGIN

SEQ ID NO: 1813 - protein, 512 aa, unidentified
  REGION 1..512: note = Description of Unknown: uncultivated organism sequence
  REGION 1..512: note = Category: MG81 effectors
  REGION 1..512: note = Description: MG81-91 effector
MPTKQKEGGNRCVLTLPLLTEPWQEHIIEKRFKIIEHLKNQLISIELRKLKKLQRTKAYKNLIKQIESVPKSERTVLYKERNKMLKDAGFSQYTFMDDMAGKKSLMQKHFESHINVQIAHKAAIDVWSSFEKFLFGTGQIVHYQKRGTLSSVASKSPKTGMFYYSDENIFKWSGGGTKPKGGIILCLRVASLKTNYEKEMVANNEIKYYRVVRKWMKTKYKYYLQITFAGKPADKHREISTGRVGIDIGTQTIAIASDKSVKLLELADKVNKNHIKKCELQRKLDRSRRYTNPDNFNPDGTVKRGTKGHKLKWNKSKHYLEVAGKIRELERKNADIRKYQHTCLANDILAMGNQIYIEPMNYKGLQKRAKETQVDEKGRYKKKKRFGKSLANKAPAMFVTILKTKAEQHGGEVYEVDIMSYRASQCDHTTGEYTKHGLNDRWRILGNGDKVQRDLYSAFLIKNSNKTHDEIDLDKCSKTYDSFKKLHDKEIENIRNEVILRKRRNISSYGIA

SEQ ID NO: 1814 - protein, 512 aa, unidentified
  REGION 1..512: note = Description of Unknown: uncultivated organism sequence
  REGION 1..512: note = Category: MG81 effectors
  REGION 1..512: note = Description: MG81-92 effector
MPTKQKEDSNRCVLTLPLLTEPWQEHIIEKRFKIIEHLKNQLISIELRKLKKLQRTKAYKNLIKQIESVPKSERTVLYKERNKMLKDAGFSQYTFMDDMAGKKSLMQKHFESHINVQIAHKAAIDVWSSFEKFLFGSGQMIHYQKRGTLSSVASKSPKTGMFYYPDENIFKWSGGGTKPKGGIILCLRVASVKTNYEKEMVANNEIKYYRVVRKWMKTKYKYYLQITFAGKPADKHREISTGRVGIDIGTQTIAIASDKSVKLLELADKVNKNHIKKCELQRKLDRSRRYTNPDNFNPDGTVKRGTKGHKLKWNKSKHYIEIAGKIRELERKNADIRKYQHTCLANDILAMGNQIYIEPMNYKGLQKRAKETQVDEKGRYKKKKRFGKSLANKAPAMFVTILKTKAEQHGGEVYEVDIMSYRASQCDHTTGEYTKHGLNDRWRILGNGDKVQRDLYSAFLIKNSNKTHDEIDLDKCSKTYDNFKKLHDKEIENIRNEVILRKRRNISSYGIA

SEQ ID NO: 1815 - protein, 511 aa, unidentified
  REGION 1..511: note = Description of Unknown: uncultivated organism sequence
  REGION 1..511: note = Category: MG81 effectors
  REGION 1..511: note = Description: MG81-93 effector
MAKCSTDTCCLTLPLRLEKWQEDRLAKRFEIARQIYNTMVRAELKKLRAMEQSEPYKANQEKIQALDRKTQTDKQALKALYKERDKLLRDGGFSEYGFKSDIKNYYKHFNNNIGSNVAFHGIAPQVWAAFEKMLFKKEGKKVHFKKKGDIHSLRGYSATGKSGGVEIIFRETYIEWKGLKLPLKLSPDNIYETQMLSYRVKYVRLLRKPGKRKDRWYAQLSLEGKPVIKYNPKTGEVRHPIGKGAVGLDIGPQTLAYSAATGADLVELANQVQNVEQEKRRLQRKLDRSRRATNPGNYADDGTIRRGIALTHNKSKRYLRTQQELKYLQHQQAEIRKRQHTELANHLLSLGDCFYVEKMVWTSLTHRAKETEISEKTGKIKRKKRFGKSVANKAPATLIGILQRKSAALGIPGVIEVPTSVKASQYNHQSGTYTPKPLSQRWNNMPDGERIQRDLYSAFLLQHYDPQTNTFDANSLHQDYPQFVQYHHDAVLRLYAMPKTPSSMGIKRSLR

SEQ ID NO: 1816 - protein, 512 aa, unidentified
  REGION 1..512: note = Description of Unknown: uncultivated organism sequence
  REGION 1..512: note = Category: MG81 effectors
  REGION 1..512: note = Description: MG81-94 effector
MKKSSTDTCCLTLPLKLEKWQEDRLAKRFEIARQLYNTLVHAELKRLAQVKQTAEYRENERKIRALDWNDPGDQAKLKGLYKERRKSLKTAGFTDYSFTTDMGKYYKHFRDNIGSSVAVHGIAPQVWAAFDKLLFKKGGKKVHYKKPGEVNSVQGYSRTGKSGGTEIMFRGPYIEWKGLKLPLKLSPDNAYETDMLQRRVKLVRLVRRPGKRRDRWYAQLVLEAKPAIKADPVTGKAVHPIGSGPVGLDIGPQTLAYSAAGAAGLVELADRVQNIEQEKRCLQRKMDRSRRATNPDNYAEDGTIRCGVKLTHNKSKRYRRSQQELKYLQHRQAEIRKLQHIQLANHLLSLGDHFYVEKMEWSSLTHRAKKTVISEKTGKPRSKKRFGKSIANKAPAMLIEILRQKCKSLGLPNVVEINPADIKASQYNHLTGEYVKKSLSRRWNEMQDGEHLQRDLYSAFLLQHYDSMSKALDLDSLARDYPAFVQYHHREIERLHALPKTPSSMGIRRSIA

SEQ ID NO: 1817 - protein, 542 aa, unidentified
  REGION 1..542: note = Description of Unknown: uncultivated organism sequence
  REGION 1..542: note = Category: MG81 effectors
  REGION 1..542: note = Description: MG81-95 effector
MATTDKKDKDKEKLRAYKFRLDPNQAQTIALYQAAGAARYTYNMLTAYNLEVNRLRDDYWKKRHDEGISDADIKKELNALTKEDKRYKQLKYGVFGTQYLTPEKKRHEQAEHRIENGEDPSVVWNQETERSANPWLHTANQRVLVSGLQNASDAWDNFWASRTGKRAGRLVGTPRFKKKGISRDSFTVPAAETMGAYGTAYLRGEAAYQQGKRTITDYRHVRLSYLGVIRTYDSTKPLVKAVAAGAEIRSYTVSRNADRWYVSFLVKFSEPIRRSATKRARAAGAVGVDLGVKYLASLSDSEAPQRFPNLKFAEGLPSLENPRWSEASSRRLHKLQRALARSQKGSNRRSRLVKQIARLHHMTALRRESNLHQLTKKLSTGYTMVGLEDLNVSGMTASAKGTVENPGKNVAQKSGLNRVVLDAAFGVFRYQLEYKTAWYGSTLEKIDRYFASSQTCSECGRKAKTKLTLRDRVFDCAYCGNMMDRDFNAAVNICREAQRLFNKKLASENGESLNGRGSRGALRGAETVEASRPPASHRRGSP

SEQ ID NO: 1818 - protein, 512 aa, unidentified
  REGION 1..512: note = Description of Unknown: uncultivated organism sequence
  REGION 1..512: note = Category: MG81 effectors
  REGION 1..512: note = Description: MG81-96 effector
MKKSNTDTCCLTLPLKLEKWQEDRLAKRFEIARQLYNTLVHAELKRLAQVKQTAEYRENERKIRALDWNDPGDQAKLKGLYKERRKSLKTAGFTDYSFTTDMGKYYKHFRDNIGSSVAVHGIAPQVWAAFDKLLFKKGGKKVHYKKPGEVNSVQGYSRTGKSGGTEIMFRGPYIEWKGLKLPLKLSPDNAYETDMLQRRVKLVRLVRRPGKRRDRWYAQLVLEAKPAIKADPVTGKAVHPIGSGPVGLDIGPQTLAYSAAGAAGLVELADRVQNIEQEKRFLQRKMDRSRRAANPDNYAEDGTIRRGVKLTHNKSKRYRRSQQELKYLQRRQAEIRKLQHIQLANHLLSLGDHFYVEKMEWSSLTHRTKKTVISEKTGKPRSKKRFGKSIANKAPAMLIEILRQKCKSLGLPNVVEINPADIKASQYNHLTGEYVKKSLSRRWNDMQDGEHLQRDLYSAFLLQHYDSCSKTLDHDSIVRDYPAFVQYHHQEIERLHALPKTPASMGIRRSIA

SEQ ID NO: 1819 - protein, 534 aa, unidentified
  REGION 1..534: note = Description of Unknown: uncultivated organism sequence
  REGION 1..534: note = Category: MG81 effectors
  REGION 1..534: note = Description: MG81-97 effector
MGWKSKGRGGKRVKRSSTDTCCLTLPLKLEKWQSDRLEKRFEIGRQIYNTIVHAELKKLRKLERTQQYQEIEQKLENAKQEETKELWKKKRQLLDQNGLSENHFKADMKHYYPHFKDNIASSVAVHGIASQAWTAFEKVLLSKDGKMVHFKKKGELSSLRGYSQAGKSGGIEIIFRGSYVEWKGLKLPLKLSPDNDYETEMLSKRVKYVRILRKDGKTKTHWYAQLALEGKPAVKRDSISGAPKHPVGHGVVGIDIGTRTLAYSTDKEVNLLELADRVQNIEQEKRRLQRKMDRSRRAMNPGNYKPDGSIKQGVKLTWNNSKRYKRIQHQYAMIQHHQADIRKQQHNELANYLLTLGDCFFVENMSYCDLAHRANKTEISEKTGRYKRKKRFGKSIANKAPAMLITMLKQKCQSRGLEGVKEVDTHVCASQYNHQTDTCIKKALENRWNIMPDGERIQRDLYSAFLLQHCRRDLPEYNRKELQKEFGEELYRVFDREALQRDYPQFVAYHHMTIQRLSELPHTIPSMGIRRIIS

SEQ ID NO: 1820 - protein, 538 aa, unidentified
  REGION 1..538: note = Description of Unknown: uncultivated organism sequence
  REGION 1..538: note = Category: MG81 effectors
  REGION 1..538: note = Description: MG81-98 effector
MNNEEKEKEGATCCLTLPLKLEKWQSDHLEKRFEIARQLYNTLVHAELKKKCQVERMPEYQEIMKMIDAASNQKEKWALEKKRKAFLEENGFSRNAFKADMEKYYKHFNDNIGANVALHGITAQVWIAFDKVFVDNYKQKGKVHFKKPGELCSVQGYSQKKSGGKEIMFREDRIIWNQQGNRDRKKVKREFLLKLSPDNPYEAEMLKRHVKFVRILRKDGKTKPHWYAQLVLEGKPAVKRDPASGAPKHPVGHGVVGIDIGTRTLAYSTDKEVNLLELADRVQNIEQEKRRLQRKMDRSRRATNPENYNPDGTFKRGVKLTRNKSKRYRRIQHQLAMIQHHQADIRKQQHNELANYLLTLGDCFFVENMSYCDLVHRANKTEISEKTGRYKRKKRFGKSIANKAPAMLITMLKQKCQSRGLEGVKEVDTHVRASQYNHQTDTCIEKALENRWNVMPDGERIQRDLYSAFLLQHCKQGLPEYNRKELKKEFGEELYRVFDREALQRDYPQFVAYHHMTIQRLSELPHTIPSMGIRRIIS

SEQ ID NO: 1821 - protein, 550 aa, unidentified
  REGION 1..550: note = Description of Unknown: uncultivated organism sequence
  REGION 1..550: note = Category: MG81 effectors
  REGION 1..550: note = Description: MG81-99 effector
MGWKSKGRGGTLVDNEEKKEDGATCCLTLPLKLEKWQSDHLEKRFEIARQLYNTLVHAELKKKCQVERMPEYQEIMKMIDTASNQKEKWALEKKRKAFLEENGFSRNAFKADMEKYYKHFNDNIGANVALHGITAQVWIAFDKVFVDNYKQKGKVHFKKPGELCSVQGYSQKKSGGKEIMFREDRIIWNQQGNRDRKKVKREFLLKLSPDNPYEAEMLKRHVKFVRILRKDGKTKPHWYAQLVLEGKPAVKRDPASGAPKHPIGHGVVGIDIGTRTLAYSTDKEVNLLELADRVQNIEQEKRRLQRKMDRSRRATNPENYNPDGTFKRGVKLTRNKSKRYRRIQHQLAMIQHHQADIRKQQHNELANYLLTLGDCFFVENMSYCDLVHRANKTEISEKTGRYKRKKRFGKSIANKAPAMLITMLKQKCQSRGLKGVKEVDTHVRASQYNHQTDTCIEKALENRWNVMPDGERIQRDLYSAFLLQHCKQGLPEYNRKELKKEFGEELYRVFDREALQRDYPQFVAYHHMTIQRLSELPHTIPSMGIRRIIS

SEQ ID NO: 1822 - protein, 357 aa, unidentified
  REGION 1..357: note = Description of Unknown: uncultivated organism sequence
  REGION 1..357: note = Category: MG81 effectors
  REGION 1..357: note = Description: MG81-100 effector
MNNEEKEKEGATCCLTLPLKLEKWQSDHLEKRFEIARQLYNTLVHAELKKKCQVERMPEYQEIMKMIDTASNQKEKWALEKKRKAFLEENGFSRNAFKADMEKYYKHFNDNIGANVALHGITAQVWIAFDKVFVDNYKQKGKVHFKKPGELCSVQGYSQKKSGGKEIMFREDRIIWNQQGNRDRKKVKREFLLKLSPNNPYEAEMLKRHVKFVRILRKDGKTKPHWYAQLVLEGKPAVKRDPISSAPKHPVGHGVVGIDIGTRTLAYSTDKEVNLLELADRVQNIEQEKRRLQRKMDRSRRAMNPENYNSDGTFKRGVKLTRNKSKRYRRIQHQLAMIQHHQADIRKQQHNELANFC

SEQ ID NO: 1823 - protein, 522 aa, unidentified
  REGION 1..522: note = Description of Unknown: uncultivated organism sequence
  REGION 1..522: note = Category: MG81 effectors
  REGION 1..522: note = Description: MG81-101 effector
MKKSSTDTCCLTLPLKLEKWQSDRLEKRFEIGRQIYNTVVRAELKKLHQLERTPQYREIEQKLKEAKQEEAKELWKKRTQLLSQSGFSEYGFKSDMKYYYQHFKENIGSSVAVHGIASQVWTAFEKVLFSKDGKMVHFKKKGELSSLRGYSQAGKSGGKEIIFRGNYIEWKELKLPLKLTPNNDYETEMLSKRVKYVRLLRQDGKTKPHWYAQLVLEGKPAIKRDPVSGAPKHHVGHGVVGLDIGTRTLAYSADDKVDLLELADRVQNIEQEKMLLQRKLDRSRRATNPENYKPDGTIKKGVKLTRNKSKRYRKIQHQLAMLQHRQADIRKRQHNELANYLLTLGDCFFVEDMDYRALTRKAKKTEISEKTGRYKRKKRFGKSIANKAPSMLIALLDQKCKSLNLEGVKKVDTAVKASQYNHQTDECKAKELKERWNIMPDGERIQRDLYSAFLLQHCKRGLPEYNRKELKKEFGEELYRVFDREALQRDYPQFVVYHHMTIQRLSALPKTIASMGIRRSIS

SEQ ID NO: 1824 - protein, 548 aa, unidentified
  REGION 1..548: note = Description of Unknown: uncultivated organism sequence
  REGION 1..548: note = Category: MG81 effectors
  REGION 1..548: note = Description: MG81-102 effector
MEWKSTGRGGTLVDNEEKKEDGATCCLTLPLKLEKWQSDHLEKRFEIARQLYNTLVHAELKRIHRIERMPEYREIERQIEATTDKKEKWALKNQKKQFLRKNGINRNTFTTDMKRLYKHFNDNIGSNVAQHGIVSQVLTAFEKVYIENQSGEVHFKKPGDLRSVQGYSQKKSGGVEIMFREGKIIWNQQGNNDRKGVAREFPLKLSPDNSYEAEMLKKHVKFVRILRNEGKTKPHWYAQLVLEGKPAIKRDPASGAPKHPVGHGVVGIDIGTRTLAYSTDSKVDLIELADRVQNTEQEKMLLQRKLDRSRRATNPENYKPDGTIKKGVKLTRNKSKRYRKIQHQLAMLQHRQADIRKRQHNELANYLLTLGDCFFVEDMDYRALTRKAKKTEISEKTGRYKRKKRFGKSIANKAPSMLIALLDQKCKSLNLEGVKKVDTAVKASQYNHQTDECKAKKLKERWNIMPDGERIQRDLYSAFLLQHCRRDLPEYNRKKLQEAFGNELYRVFDREALQRDYPKFVEYHRETIQRLSALPKTIASMGIRRIIS

SEQ ID NO: 1825 - protein, 511 aa, unidentified
  REGION 1..511: note = Description of Unknown: uncultivated organism sequence
  REGION 1..511: note = Category: MG81 effectors
  REGION 1..511: note = Description: MG81-103 effector
MAKCSTDTCCLTLPLRLEKWHEDRLAKRFEIARQIYNTMVRAELKKLRAMEQSEPYKANQEKIQALDWKTQADKQALKALYKERDKLLRDGGFSEYGFKSDIKNYYKHFNNNIGSSVAVHGIAPQVWAAFEKMLFKKEGKKVHFKKKGDIRSLRGYSVTRKSGGVEIIFRETYIEWKGLKLPLKLSPDNIYETQMLSYRVKYVHLLRKPGKRKDRWYAQLSLEGKPVIKYNPKTGEVRHPIGKGAVGLDIGPQTLAYSAATGADLVELANQVQNVEQEKRRLQRKLDRSRRATNPGNYADDGTIRRGIALTHNKSKRYLRTQQELKYLQHQQAEIRKRQHTELANHLLSLGDCFYVEKMVWTSLTHRAKETEISEKTGKIKRKKRFGKSVANKAPATLIGILQRKSAALGIPGVIEVPTSVKASQYNHQSGTYTPKPLSQRWNNMPDGERIQRDLYSAFLLQHYDPQTNTFDANSLHQDYPQFVQYHHDAVLRLYAMPKTPSSMGIKRSLR

SEQ ID NO: 1826 - protein, 512 aa, unidentified
  REGION 1..512: note = Description of Unknown: uncultivated organism sequence
  REGION 1..512: note = Category: MG81 effectors
  REGION 1..512: note = Description: MG81-104 effector
MKKSSTDTCCLTLPLKLEKWQEDRLAKRFEIARQLYNTLVHAELKRLVQIKRTAEYLENEQKIRALDRNNPADRAKLQELYKEQRKSLKTAGFTDYSFTTDMGKYYKHFRDNIGSSVAVHGIAPQVWAAFDKVLFKKGGKKVHYKRPGEVNSVQGYSRTGKSGGREIMFRGAYIEWKGLKLPLKLSPDNAYETDMLQRRVKLVRLVRRPGKRRDRWYAQLVLEGKPAIKADPVTGKAVHPIGSGPIGLDIGPQTLAYSAAGAAGLVELADRVQNIEQEKRRLQRKMDRSRRAANPDNYAEDGTIRRGVKLTHNKSKRYRRSQQELKYLQHRQAEIRKLQHIQFANHLLSLGDHFYVEKMEWSSLTHRAKETVISEKTGKPRSKRRFGKSIANKAPAMLIEILRQKCKSLGLSDVVEINPADIKASQYNHLTGEYVKKSLSRRWNDMQDGEHLQRDLYSAFLLQHYDSCSKTLDHDSIVRDYPAFVQYHHREIERLHALPKTPSSMGIRRSIA

SEQ ID NO: 1827 - protein, 311 aa, unidentified
  REGION 1..311: note = Description of Unknown: uncultivated organism sequence
  REGION 1..311: note = Category: MG81 effectors
  REGION 1..311: note = Description: MG81-105 effector
MILLAKNNNNTDTCVLTLPLRVEKWQEDCLLKRFEAARRIYNSLLNFELKKLRQLERTVEYRQIQSVISSAYRSNTKDSPECKDAFKRREKLISANGISEYGFKSDVKFFYKHFDGLIGSNVAVHCIAVQLWAAFDKYLRGSGKEIHFKRLGDISSLKGYSVKGKSGGCEIIFRGQYIEWTRKKKKLLLPLKIDPDNEYEREMLSRRVKYVRIIKKPGKNRLRWYAQLTLEGKPALKYSAETGKPIHSVGKGNVGIDIGPRPLHTLPIKKLLCLNLLTESPISSIKKRSFSASWIAAAAQRIRTTTNRTAQ

SEQ ID NO: 1828 - protein, 511 aa, unidentified
  REGION 1..511: note = Description of Unknown: uncultivated organism sequence
  REGION 1..511: note = Category: MG81 effectors
  REGION 1..511: note = Description: MG81-106 effector
MAKCSTDTCCLTLPLRLEKWQEDRLAKRFEIARQIYNTMVRAELKKLRAMEQSEPYKANQEKIQALDRKTQTDKQALKALYKERDKLLRDGGFSEYGFKSDIKNYYKHFNNNIGSNVAFHGIAPQVWAAFEKMLFKKEGKKVHFKKKGDIHSLRGYSATGKSGGVEIIFRETYIEWKGLKLPLKLSPDNIYETQMLSYRVKYVRLLRKPGKRKDRWYAQLSLEGKPVIKYNPKTGEVRHPIGKGAVGLDIGPQTLAYSAATGADLVELANQVQNVEQEKRRLQRKLDRSRRATNPGNYADDGTIRRGIALTHNKSKRYLRTQQELKYLQHQQAEIRKRQHTELANHLLSLGDCFYVEKMVWTSLTHRAKETEISEKTGKIKRKKRFGKSVANKAPATLIGILQRKSAALGIPGVIEVPTSVKASQYNHQSGTYTHKPLSQRWNNMPDGERIQRDLYSAFLLQHYDPQTNTFDANSLHQDYPQFVQYHHDAVLRLYAMPKAPSSMGIKRSLR

SEQ ID NO: 1829 - protein, 527 aa, unidentified
  REGION 1..527: note = Description of Unknown: uncultivated organism sequence
  REGION 1..527: note = Category: MG81 effectors
  REGION 1..527: note = Description: MG81-107 effector
MAKNNNNNDTDTCVLTLPLRVEKWQEDCLLKRFEAARRIYNSLLNFELKKLRQLERTVEYRQIQSVISSAYRSNTKDSPECKDAFKRREKLISANGISENGFKSDVKFFYKHFDGLIGSSVAVHCIAVQLWAAFDKYLSGSGKEIHFKRLGDISSLKGYSVKGKSGGCEIIFRGQYVEWTRKKKKLLLPLKIDPDNEYEREMLSRRVKYVRIIKKPGKNRLRWYAQLTLEGKPALKYSAETGKPIHSVGKGNVGIDIGPQTVAYASDKEVALLELADRVTNIEHQKKKLQRKLDRSRRATNPDNYKPDGTIKRGVKLTRNKSKRYLKLQSKLAYIQHRQAEIRKLQHTCLANHMLTLGDCFFVEKMNWPGLAHRAKETSISEKTGRYKRKKRFGKSLANKAPAMFISILKRKCETLGLPGVVEVDTFRLRASQYNHLSDTYEKKSLSERWNYMPISDGSDSSKTKRIQRDLYSAFLLQHTIPQPCSFDKEALRIDYPNFVIMHDAEIHRLESLPKTITSMGVRRSHS

SEQ ID NO: 1830 - protein, 536 aa, unidentified
  REGION 1..536: note = Description of Unknown: uncultivated organism sequence
  REGION 1..536: note = Category: MG81 effectors
  REGION 1..536: note = Description: MG81-108 effector
MDADEYKKLLKKFHKLSDRHILVAEADMSYPDVQKVVNLSDRIRKAGNELVSLMKKNYEQLMRTKKYRKLLQLYGSTEDKKKRKTYAGQLNEMQEQYNVTWDFCRASMIPIGKKYGIDAIFALTKAEDVWRGVEKCLYGNGRMLHFSKYGDFPCIRAKQINRGIPMSVKNDELKFKLGKLVFGIQVKDRFQTDEVNAVLDYLAQPEVIDNKAVKTLQDEACCISTYRPCYATLVPKFIRGKYRVYLHLVIEGKAKPKYDSSGNPRHKYGRGVVGADIGTQTVAYTSDTETGLKNLSERGNSIQKSERLERLYYRAMDRSRRATNPKNYNADGTIKKGKKKWTYSRHYKKLKAKHAELCCINATNRQLAINEDVNHLRCLGDTFVTEPKNAARLMKRAKETTVNNKGKINRKKRFGKSVKNRCPGGFQAAVENKFKTSGGTYIEVPNNYRASQYDHTADDYIKKKLSDRMYKLADGTLVQRDWYSSFLLYCYNYRTNDIDKKKCAAEFKKCYSMEKDLIEWIKENKIKVLNSGIKIA

SEQ ID NO: 1831 - protein, 334 aa, unidentified
  REGION 1..334: note = Description of Unknown: uncultivated organism sequence
  REGION 1..334: note = Category: MG81 effectors
  REGION 1..334: note = Description: MG81-109 effector
MLKRHVKFVRILRKDGKTKPHWYAQLVLEGKPAVKRDPASGAPKHPIGHGVVGIDIGTRTLAYSTDKEVNLLELADRVQNIEQEKRRLQRKMDRSRRATNPENYNPDGTFKRGVKLTRNKSKRYRRIQHQLAMIQHHQADIRKQQHNELANYLLTLGDCFFVENMSYCDLVHRANKTEISEKTGRYKRKKRFGKSIANKAPAMLITMLKQKCQSRGLKGVKEVDTHVRASQYNHQTDTCIEKALENRWNVMPDGERIQRDLYSAFLLQHCKQGLPEYNRKELKKEFGEELYRVFDREALQRDYPQFVAYHHMTIQRLSELPHTIPSMGIRRIIS

SEQ ID NO: 1832 - protein, 511 aa, unidentified
  REGION 1..511: note = Description of Unknown: uncultivated organism sequence
  REGION 1..511: note = Category: MG81 effectors
  REGION 1..511: note = Description: MG81-110 effector
MAKCSTDTCCLTLPLRLEKWQEDRLAKRFEIARQIYNTMVRAELKKLRAMEQSEPYKANQEKIQALDWKTQTDKQALKALYKERDKLLRDGGFSEYGFKSDIKNYYKHFNNNIGSNVAFHGIAPQVWAAFEKMLFKKEGKKVHFKKKGDIHSLRGYSAAGKSGGVEIIFRETYIEWKGLKLPLKLSPDNIYETQMLSYRVKYVRLLRKPGKRKDRWYAQLSLEGKPVIKYNPKTGEVRHPIGKGAVGLDIGPQTLAYSAATGADLVELANQVQNVEQEKRRLQRKLDRSRRATNPGNYADDGTIRRGIALTHNKSKRYLRTQQELKYLQHQQAEIRKRQHTELANHLLSLGDCFYVEKMVWTSLTHRAKETEISEKTGKIKRKKRFGKSVANKAPATLIGILQRKSAALGIPGVIEVPTSVKASQYNHQSGTYTPKPLSQRWNNMPDGERIQRDLYSAFLLQHYDPQTNTFDANSLHQDYPQFVQYHHDAVLRLYAMPKAPSSMGIKRSLR

SEQ ID NO: 1833 - protein, 566 aa, unidentified
  REGION 1..566: note = Description of Unknown: uncultivated organism sequence
  REGION 1..566: note = Category: MG81 effectors
  REGION 1..566: note = Description: MG81-111 effector
MGWKSKGRGGTLVDNEEKKEDGATCCLTLPLKLEKWQSDHLEKRFEIARQLYNTLVHAELKRIHRIERMPEYREIERLIEATTDKKEKWALKNQKKQFLRKNGINRNTFTTDMKRLYKHFNDNIGSNVAQHGIVSQVLTAFEKVYIENQSGEVHFKKPGDLRSVQGYSQKESGGKEIMFRNGKIIWTQQENDDRKKSPKYQQRKKRQNYKGVKGIAREFPVVFSKNNPYEAEMLTKHVKFVRILRKDGKTKPHWYAQLVLEGKPAIKRDPASGAPKHPVGHGVVGIDIGTRTLAYSADSKVDLIELADRVQNIEQEKLLLQRKLDRSRRATNPENYKPDGTIKKGVKLTRNKSKRYRKIQHQLAMLQHRQADIRKRQHNELANYLLTLGDCFFVEDMDYRALTRKAKKTEISEKTGRYKRKKRFGKSIANKAPSMLIALLDQKCKSLNLEGVKKVDTAVKASQYNHQTDECKAKELKERWNIMPDGERIQRDLYSAFLLQHCKRGLPEYNRKKLQETFGNELYRVFDREALQRDYPKFVEYHRKTIQRLSALPKTIASMGIRRIIS

SEQ ID NO: 1834 - protein, 538 aa, unidentified
  REGION 1..538: note = Description of Unknown: uncultivated organism sequence
  REGION 1..538: note = Category: MG81 effectors
  REGION 1..538: note = Description: MG81-112 effector
MNNEEKEKEGATCCLTLPLKLEKWQSDHLEKRFEIARQLYNTLVHAELKKKCQVERMPEYQEIMKMIDTASNQKEKWALEKKRKAFLEENGFSRNAFKADMEKYYKHFNDNIGANVALHGITAQVWIAFDKVFVDNYKQKGKVHFKKPGELCSVQGYSQKKSGGKEIMFREDRIIWNQQGNRDRKKVKREFLLKLSPNNPYEAEMLKRHVKFVRILRKDGKTKPHWYAQLVLEGKPAVKRDPISSAPKHPVGHGVVGIDIGTRTLAYSTDKEVNLLELADHVQNIEQEKRRLQRKMDRSRRATNPENYNPDGTFKRGVKLTRNKSKRYRRIQHQLAMIQHHQADIRKQQHNELANYLLTLGDCFFVENMSYCDLVHRANKTEISEKTGRYKRKKRFGKSIANKAPAMLITMLKQKCQSRGLKGVKEVDTHVRASQYNHQTDTCIEKALENRWNVMPDGERIQRDLYSAFLLQHCKQGLPEYNRKELKKEFGEELYRVFDREALQRDYPQFVAYHHMTIQRLSELPHTIPSMGIRRIIS

SEQ ID NO: 1835 - protein, 534 aa, unidentified
  REGION 1..534: note = Description of Unknown: uncultivated organism sequence
  REGION 1..534: note = Category: MG81 effectors
  REGION 1..534: note = Description: MG81-113 effector
MGWKSKGRGGKRVKRSSTDTCCLTLPLKLEKWQSDRLEKRFEIGRQIYNTIVHAELKKLRKLERTQQYQEIEQKLENAKQEETKELWKKKRQLLDQNGLSENHFKADMKHYYPHFKDNIASSVAVHGIASQAWTAFEKVLLSKDGKMVHFKKKGELSSLRGYSQTGKSGGIEIIFRGSYVEWKGLKLPLKLSPDNDYETEMLSKRVKYVRILRQDGKTKPHWYAQLVLEGKPAVKRDPISGAPKHPIGRGVVGIDIGTRTLAYSADSKVDLIELADRVQNIEQEKLLLQRKLDRSRRATNPENYKPDGTIKKGVKLTRNKSKRYRRIQHQLAMIQHHQADIRKQQHNELANYLLTLGDCFFVENMSYCDLAHRANKTEISEKTGRYKRKKRFGKSIANKAPAMLITMLKQKCQSRGLKGVKEVDTHVRASQYNHQTDTCIEKALENRWNVMPDGERIQRDLYSAFLLQHCKQGLPEYNRKELKKEFGEELYRVFDREALQRDYPQFVAYHHMTIQRLSELPHTIPSMGIRRIIS

SEQ ID NO: 1836 - protein, 534 aa, unidentified
  REGION 1..534: note = Description of Unknown: uncultivated organism sequence
  REGION 1..534: note = Category: MG81 effectors
  REGION 1..534: note = Description: MG81-114 effector
MGWKSKGRGGTLVKKSSTDTCCLTLPLKLEKWQSDRLEKRFEIGRQIYNTVVRAELKKLQQVERTPQYREIEQKLKEAKQEEAKELWKTRTQLLSKSGFSEYGFKSDMKYYYQHFKENIGSSVAVHGIASQVWTAFEKVLFSKDGKMVHFKKKGELSSLRGYSQAGKSGGIEIIFRGSYVEWKGLKLPLKLSPDNDYETEMLSKRVKYVRILRKEGKTKPHWYAQLVLEGKPAIKRDPASGAPKHPVGHGVVGIDIGTRTLAYSADSKVDLIELADRVQNIEQEKMLLQRKLDRSRRATNPENYKPDGTIKKGVKLTRNKSKRYRKIQHQLAMLQHRQADIRKRQHNELANYLLTLGDCFFVEDMDYRALTRKAKKTEISEKTGRYKRKKRFGKSIANKAPSMLIALLDQKCKSLNLEGVKKVDTAVKASQYNHQTDECKAKELKERWNIMPDGERIQRDLYSAFLLQHCRRDLPEYNRKKLQETFGNELYRVFDREALQRDYPQFVAYHHMTIQRLSALPKTIASMGIRRSIS

SEQ ID NO: 1837 - protein, 213 aa, unidentified
  REGION 1..213: note = Description of Unknown: uncultivated organism sequence
  REGION 1..213: note = Category: MG81 effectors
  REGION 1..213: note = Description: MG81-115 effector
MKLTRNKSKRYLKLQSKLAYIQHRQAEIRKLQHTCLANHMLTLGDRFFVEKMNWPGLAHRAKETSISEKTGRYKRKKRFGKSLANKAPAMFISILKRKCETLGLPGVVEVDTYSLKASQYNHLSDTYEKKSLSERWNYMPISDGSDSSKTKRIQRDLYSAFLLQHTIPQPCSFDKKALRIDYPNFVTMHDAEIHRLESLPKTITSMGVRRSHS

SEQ ID NO: 1838 - protein, 522 aa, unidentified
  REGION 1..522: note = Description of Unknown: uncultivated organism sequence
  REGION 1..522: note = Category: MG81 effectors
  REGION 1..522: note = Description: MG81-116 effector
MKRSSTDTCCLTLPLKLEKWQSDRLEKRFEIGRQIYNTIVHAELKKLRKLERTQQYQEIEQKLENAKQEETKELWKKKRQLLDQNGLSEDHFKADMKYYYPHFKDNIASNVAVHGIASQAWTAFEKVLFSKDGKMVHFKKKGELSSLRGYSRAGKSGGVEIIFRGSYVEWKGLKLPLKLSPDNDYETEMLSKRVKYVRILRKDGKTKTHWYAQLVLEGKPAVKRDPASGAPKHPIGHGVVGIDIGTRTLAYSTDKEVNLLELADHVQNIEQEKRRLQRKMDRSRRATNPENYNPDGTFKRGVKLTRNKSKRYRRIQHQLAMIQHHQADIRKQQHNELANYLLTLGDCFFVENMSYCDLVHRANKTEISEKTGRYKRKKRFGKSIANKAPAMLITMLKQKCQSRGLEGVKEVDTHVRASQYNHQTDTCIEKALENRWNVMPDGERIQRDLYSAFLLQHCKQGLPEYNRKELKKEFGEELYRVFDREALQRDYPQFVAYHHMTIQRLSELPHTIPSMGIRRIIS

SEQ ID NO: 1839 - protein, 538 aa, unidentified
  REGION 1..538: note = Description of Unknown: uncultivated organism sequence
  REGION 1..538: note = Category: MG81 effectors
  REGION 1..538: note = Description: MG81-117 effector
MNNEEKEKEGATCCLTLPLKLEKWQSDHLEKRFEIARQLYNTLVHAELKKKCQVERMPEYQEIMKMIDTASNQKEKWALEKKRKAFLEENGFSRNAFKADMEKYYKHFNDNIGANVALHGITAQVWIAFDKVFVDNYKQKGKVHFKKPGELCSVQGYSQKKSGGKEIMFREDRIIWNQQGNRDRKKVKGEFLLKLSPNNPYEAEMLKRHVKFVRILRKDGKTKPHWYAQLVLEGKPAVKRDPISSAPKHPVGHGVVGIDIGTRTLAYSTDKEVNLLELADHVQNIEQEKRRLQRKMDRSRRATNPENYNPDGTFKRGVKLTRNKSKRYRRIQHQLAMIQHHQADIRKQQHNELANYLLTLGDCFFVENMSYCDLVHRANKTEISEKTGRYKRKKRFGKSIANKAPAMLITMLKQKCQSRGLKGVKEVDTHVRASQYNHQTDTCIEKALENRWNVMPDGERIQRDLYSAFLLQHCKQGLPEYNRKELKKEFGEELYRVFDREALQRDYPQFVAYHHMTIQRLSELPHTIPSMGIRRIIS

SEQ ID NO: 1840 - protein, 388 aa, unidentified
  REGION 1..388: note = Description of Unknown: uncultivated organism sequence
  REGION 1..388: note = Category: MG81 effectors
  REGION 1..388: note = Description: MG81-118 effector
MVHFKKKGELSSLRGYSQTGKSGGIEIIFRGSYVEWKGLKLPLKLSPDNDYETEMLSKRVKYVRILRQDGKTKPHWYAQLVLEGKPAVKRDPISGAPKHPIGHGVVGIDIGTRTLAYSADSKVDLIELADRVQNIEQEKLLLQRKLDRSRRATNPGNYNPDGTIKKGVKLTRNKSKRYRKIQHQLAMLQHRQADIRKRQHNELANYLLTLGDCFFVEDMDYRALTRKAKKTEISEKTGRYKRKKRFGKSIANKAPSMLIALLDQKCESLNLEGVKKVDTAVKASQYNHQTDECKAKELKERWNIMPDGERIQRDLYSAFLLQHCRRDLPEYNRKELQKEFGEELYRVFDREALQRDYPQFVAYHHMTIQRLSELPHTIPSMGIRRIIS

SEQ ID NO: 1841 - protein, 538 aa, unidentified
  REGION 1..538: note = Description of Unknown: uncultivated organism sequence
  REGION 1..538: note = Category: MG81 effectors
  REGION 1..538: note = Description: MG81-119 effector
MDNEEKEKDGATCCLTLPLKLEKWQSDHLEKRFEIARQLYNTLVHAELKKKCQVERMPEYQEIMKMIDAASNQKEKWALEKKRKAFLEENGFNRNAFKADMEKYYKHFNDNIGANVALHGITAQVWIAFDKVFVDNYKQKGKVHFKKPGELCSVQGYSQKKSGGKEIMFREDRIIWNQQGNRDRKKVKREFLLKLSPDNPYEAEMLKRHVKFVRILRKDGKTKPHWYAQLVLEGKPAVKRDPASGAPKHPIGHGVVGIDIGTRTLAYSTDKEVNLLELADHVQNIEQEKRRLQRKMDRSRRATNPENYNPDGTFKRGVKLTRNKSKRYRRIQHQLAMIQHHQADIRKQQHNELANYLLTLGDCFFVENMSYCDLVHRANKTEISEKTGRYKRKKRFGKSIANKAPAMLITMLKQKCQSRGLKGVKEVDTHVRASQYNHQTDTCIEKALENRWNVMPDGERIQRDLYSAFLLQHCKQGLPEYNRKELKKEFGEELYRVFDREALQRDYPQFVAYHHMTIQRLSELPHTIPSMGIRRIIS

SEQ ID NO: 1842 - protein, 567 aa, unidentified
  REGION 1..567: note = Description of Unknown: uncultivated organism sequence
  REGION 1..567: note = Category: MG81 effectors
  REGION 1..567: note = Description: MG81-120 effector
MSNLLFLLENEEKMRYNGVEKQRKGEGTRVNNEEKEKDGATCCLTLPLKLEKWQSDHLEKRFEIARQLYNTLVHAELKKKCQVERMPEYQEIMKMIDAASNQKEKWALEKKRKAFLEENGFSRNAFKADMEKYYKHFNDNIGANVALHGITAQVWIAFDKVFVDNYKQKGKVHFKKPGELCSVQGYSQKKSGGKEIMFREDRIIWNQQGNRDRKKVKREFLLKLSPDNPYEAEMLKRHVKFVRILRKDGKTKPHWYAQLVLEGKPAVKRDPASGAPKHPIGHGVVGIDIGTRTLAYSTDKEVNLLELADHVQNIEQEKRRLQRKMDRSRRATNPENYNPDGTFKRGVKLTRNKSKRYRRIQHQLAMIQHHQADIRKQQHNELANYLLTLGDCFFVENMSYCDLVHRANKTEISEKTGRYKRKKRFGKSIANKAPAMLITMLKQKCQSRGLEGVKEVDTHVRASQYNHQTDTCIEKALENRWNVMPDGERIQRDLYSAFLLQHCKQGLPEYNRKELKKEFGEELYRVFDREALQRDYPQFVAYHHMTIQRLSELPHTIPSMGIRRIIS

SEQ ID NO: 1843 - protein, 538 aa, unidentified
  REGION 1..538: note = Description of Unknown: uncultivated organism sequence
  REGION 1..538: note = Category: MG81 effectors
  REGION 1..538: note = Description: MG81-121 effector
MNNEEKEKEGATCCLTLPLKLEKWQSDHLEKRFEIARQLYNTLVHAELKKKCQVERMPEYQEIMKMIDTASNQKEKWALEKKRKAFLEENGFSRNAFKADMEKYYKHFNDNIGANVALHGITAQVWIAFDKVFVDNYKQKGKVHFKKPGELCSVQGYSQKKSGGKEIMFREDRIIWNQQGNRDRKKVKREFLLKLSPDNPYEAEMLKRHVKFVRILRKDGKTKPHWYAQLVLEGKPAVKRDPASGAPKHPIGHGVVGIDIGTRTLAYSTDKEVNLLELADRVQNIEQEKRRLQRKMDRSRRATNPENYNPDGTFKRGVKLTRNKSKRYRRIQHQLAMIQHHQADIRKQQHNELANYLLTLGDCFFVENMSYCDLVHRANKTEISEKTGRYKRKKRFGKSIANKAPAMLITMLKQKCQSRGLKGVKEVDTHVRASQYNHQTDTCIEKALENRWNVMPDGERIQRDLYSAFLLQHCKQGLPEYNRKELKKEFGEELYRVFDREALQRDYPQFVAYHHMTIQRLSELPHTIPSMGIRRIIS

SEQ ID NO: 1844 - protein, 550 aa, unidentified
  REGION 1..550: note = Description of Unknown: uncultivated organism sequence
  REGION 1..550: note = Category: MG81 effectors
  REGION 1..550: note = Description: MG81-122 effector
MGRKSTGRGGKRVNNEEKEKDGATCCLTLPLKLEKWQSDHLEKRFEIARQLYNTLVHAELKKKCQVVRMPEYQEIMKMIDAASNQKEKWALEKKRKAFLEENGFSRNAFKADMEKYYKHFNDNIGANVALHGITAQVWIAFDKVFVDNYKQKGKVHFKKPGELCSVQGYSQKKSGGKEIMFREDRIIWNQQGNRDRKKVKREFLLKLSPDNPYEAEMLKRHVKFVRILRKDGKTKPHWYAQLVLEGKPAVKRDPISSAPKHPVGHGVVGIDIGTRTLAYSTDKEVNLLELADRVQNIEQEKRRLQRKMDRSRRAMNPENYNSDGTFKRGVKLTRNKSKRYRRIQHQLAMIQHHQADIRKQQHNELANYLLTLGDCFFVENMSYCDLVHRANKTEISEKTGRYKRKKRFGKSIANKAPAMLITMLKQKCQSRGLEGVKEVDTHVRASQYNHQTDTCIEKALENRWNVMPDGERIQRDLYSAFLLQHCKQGLPEYNRKELKKEFGEELYRVFDREALQRDYPQFVAYHHMTIQRLSELPHTIPSMGIRRIIS

SEQ ID NO: 1845 - protein, 538 aa, unidentified
  REGION 1..538: note = Description of Unknown: uncultivated organism sequence
  REGION 1..538: note = Category: MG81 effectors
  REGION 1..538: note = Description: MG81-123 effector
MDNEEKEKDGATCCLTLPLKLEKWQSDHLEKRFEIARQLYNTLVHAELKKKCQVERMPEYQEIMKMIDAASNQKEKWALEKKRKAFLEENGFSRNAFKADMEKYYKHFNDNIGANVALHGITAQVWIAFDKVFVDNYKQKGKVHFKKPGELCSVQGYSQKKSGGKEIMFREDRIIWNQQGNRDRKKVKREFLLKLSPDNPYEAEMLKRHVKFVRILRKDGKTKPHWYAQLVLEGKPAVKRDPASGAPKHPIGHGVVGIDIGTRTLAYSTDSEVNLLELADRVQNIEQEKRRLQRKMDRSRRAMNPGNYKPDGSIKQGVKLTWNNSKRYKRIQHQYAMIQHHQADIRKQQHNELANYLLTLGDCFFVENMSYCDLAHRANKTEISEKTGRYKRKKRFGKSIANKAPAMLITMLKQKCQSRGLEGVKEVDTHVCASQYNHQTDTCIKKALENRWNIMPDGERIQRDLYSAFLLQHCRRDLPEYNRKELQKEFGEELYRVFDREALQRDYPQFVAYHHMTIQRLSELPHTIPSMGIRRIIS

SEQ ID NO: 1846 - protein, 427 aa, unidentified
  REGION 1..427: note = Description of Unknown: uncultivated organism sequence
  REGION 1..427: note = Category: MG81 effectors
  REGION 1..427: note = Description: MG81-124 effector
MKYYYQHFKENIGSSVAVHGIASQVWTAFEKVLFSKDGKMVHFKKKGELSSLRGYSQAGKSGGVEIIFRGSYVEWKGLKLPLKLSPDNDYETEMLSKRVKYVRILRQDGKTKPHWYAQLVLEGKPAIKRDPASGTPKHPIGHGVVGIDIGTRTLAYSADSKVDLIELADRVQNIEQEKMLLQRKLDRSRRATNPENYKPDGTIKKGVKLTRNKSKRYRKIQHQLAMLQHRQADIRKRQHNELANYLLTLGDCFFVEDMDYRALTRKAKKTEISEKTGRYKRKKRFGKSIANKAPSMLIALLDQKCKSLNLEGVKKVDTAVKASQYNHQTDECKAKELKERWNIMPDGERIQRDLYSAFLLQHCRRDLPEYNRKKLQETFGNELYRVFDREALQRDYPKFVEYHRETIQRLSALPKTIASMGIRRSIS

SEQ ID NO: 1847 - protein, 550 aa, unidentified
  REGION 1..550: note = Description of Unknown: uncultivated organism sequence
  REGION 1..550: note = Category: MG81 effectors
  REGION 1..550: note = Description: MG81-125 effector
MGWKSKGRGGTLVDNEEKKEDGATCCLTLPLKLEKWQSDHLEKRFEIARQLYNTLVHAELKKKCQVERMPEYQEIMKMIDTASNQKEKWALEKKRKAFLEENGFSRNAFKADMEKYYKHFNDNIGANVALHGITAQVWIAFDKVFVDNYKQKGKVHFKKPGELCSVQGYSQKKSGGKEIMFREDRIIWNQQGNRDRKKVKREFLLKLSPNNPYEAEMLKRHVKFVRILRKDGKTKPHWYAQLVLEGKPAVKRDPISSAPKHPVGHGVVGIDIGTRTLAYSTDKEVNLLELADRVQNIEQEKRRLQRKMDRSRRAMNPENYNPDGTFKRGVKLTRNKSKRYRRIQHQLAMIQHHQADIRKQQHNELANYLLTLGDCFFVENMSYCDLVHRANKTEISEKTGRYKRKKRFGKSIANKAPAMLITMLKQKCQSRGLEGVKEVDTHVRASQYNHQTDTCIEKALENRWNVMPDGERIQRDLYSAFLLQHCKQGLPEYNRKELKKEFGEELYRVFDREALQRDYPQFVAYHHMTIQRLSELPHTIPSMGIRRIIS

SEQ ID NO: 1848 - protein, 550 aa, unidentified
  REGION 1..550: note = Description of Unknown: uncultivated organism sequence
  REGION 1..550: note = Category: MG81 effectors
  REGION 1..550: note = Description: MG81-126 effector
MGWKSKGGGGTRVDNEEKEKDGATCCLTLPLKLEKWQSDHLEKRFEIARQLYNTLVHAELKKKCQVERMPEYQEIMKMIDTASNQKEKWALEKKRKAFLEENGFSRNAFKADMEKYYKHFNDNIGANVALHGITAQVWIAFDKVFVDNYKQKGKVHFKKPGELCSVQGYSQKKSGGKEIMFREDRIIWNQQGNRDRKKVKREFLLKLSPNNPYEAEMLKRHVKFVRILRKDGKTKPHWYAQLVLEGKPAVKRDPISSAPKHPVGHGVVGIDIGTRTLAYSTDKEVNLLELADRVQNIEQEKRRLQRKMDRSRRAMNPENYNSDGTFKRGVKLTRNKSKRYRRIQHQLAMIQHHQADIRKQQHNELANYLLTLGDCFFVENMSYCDLVHRANKTEISEKTGWYKRKKRFGKSIANKAPAMLITMLKQKCQSRGLEGVKEVDTHVRASQYNHQTDTCIEKALENRWNVMPDGERIQRDLYSAFLLQHCKQGLPEYNRKELKKEFGEELYRVFDREALQRDYPQFVAYHHMTIQRLSELPHTIPSMGIRRIIS

SEQ ID NO: 1849 - protein, 534 aa, unidentified
  REGION 1..534: note = Description of Unknown: uncultivated organism sequence
  REGION 1..534: note = Category: MG81 effectors
  REGION 1..534: note = Description: MG81-127 effector
MGWKSKGRGGKRVKRSSTDTCCLTLPLKLEKWQSDRLEKRFEIGRQIYNTIVHAELKKLRKLERTQQYQEIEQKLENAKQEETKELWKKKRQLLDQNGLSENHFKADMKHYYPHFKDNIASSVAVHGIASQAWTAFEKVLLSKDGKMVHFKKKGELSSLRGYSQTGKSGGIEIIFRGSYVEWKGLKLPLKLSPDNDYETEMLSKRVKYVRILRQDGKTKPHWYAQLVLEGKPAVKRDPISGAPKHPIGRGVVGIDIGTRTLAYSADSKVDLIELADRVQNIEQEKLLLQRKLDRSRRATNPENYKPDGTIKKGVKLTRNKSKRYRRIQHQLAMIQHHQADIRKQQHNELANYLLTLGDCFFVEDMDYRALTRKAKKTEISEKTGRYKRKKRFGKSIANKAPAMLITMLKQKCQSRGLKGVKEVDTHVRASQYNHQTDTCIEKALENRWNVMPDGERIQRDLYSAFLLQHCKQGLPEYNRKELKKEFGEELYRVFDREALQRDYPQFVAYHHMTIQRLSELPHTIPSMGIRRIIS

SEQ ID NO: 1850 - protein, 566 aa, unidentified
  REGION 1..566: note = Description of Unknown: uncultivated organism sequence
  REGION 1..566: note = Category: MG81 effectors
  REGION 1..566: note = Description: MG81-128 effector
MGWKSKGRGGTRVNNEEKEKDGATCCLTLPLKLEKWQSDHLEKRFEIARQLYNTLVHAELKRIHRIERMPEYREIERQIEATTDKKEKWALKNQKKQFLRKNGINRNTFTTDMKRLYKHFNDNIGSNVAQHGIVSQVLTAFEKVYIENQSGEVHFKKPGDLRSVQGYSQKESGGKEIMFRNGKIIWTQQENDDRKKSPKYQQRKKRQNYKGVKGIAREFPVVFSKNNPYEAEMLTKHVKFVRILRKDGKTKPHWYAQLVLEGTPVAKYDPISGAPKHPVGHGVVGIDIGTRTLAYSTDKEVNLLELADRVQNIEQEKRRLQRKMDRSRRAMNPENYNSDGTFKRGVKLTRNKSKRYRRIQHQLAMIQHHQADIRKQQHNELANYLLTLGDCFFVENMSYCDLVHRANKTEISEKTGRYKRKKRFGKSIANKAPAMLITMLKQKCQSRGLKGVKEVDTHVRASQYNHQTDTCIEKALENRWNVMPDGERIQRDLYSAFLLQHCKQGLPEYNRKELKKEFGEELYRVFDREALQRDYPQFVAYHHMTIQRLSELPHTIPSMGIRRIIS

SEQ ID NO: 1851 - protein, 534 aa, unidentified
  REGION 1..534: note = Description of Unknown: uncultivated organism sequence
  REGION 1..534: note = Category: MG81 effectors
  REGION 1..534: note = Description: MG81-129 effector
MGWKSTGRGGKRVKRSSTDTCCLTLPLKLEKWQSDRLEKRFEIGRQIYNTIVHAELKKLRKLERTQQYQEIEQKLENAKQEETKELWKKKRQLLDQNGLSENHFKADMKHYYPHFKDNIASSVAVHGIASQAWTAFEKVLLSKDGKMVHFKKKGELSSLRGYSQAGKSGGIEIIFRGSYVEWKGLKLPLQLSPNNEYETEMLSKRVKYVRILRKDGKTKTHWYAQLALEGKPAVKRDSISGAPKHPVGHGVVGIDIGTRTLAYSTDSEVNLLELADRVQNIEQEKRRLQRKMDRSRRAMNPGNYKPDGSIKQGVKLTWNNSKRYKRIQHQYAMIQHHQADIRKQQHNELANYLLTLGDCFFVEDMDYRALTRKAKKTEISEKTGRYKRKKRFGKSIANKAPSMLIALLDQKCKSLNLEGVKMVDTAVKASQYNHQTDECKAKELKERWNIMPDGERIQRDLYSAFLLQHCRRDLPEYNRKKLQEAFGNELYRVFDREALQRDYPKFVEYHRKTIQRLSALPKTIASMGIRRIIS

SEQ ID NO: 1852 - protein, 550 aa, unidentified
  REGION 1..550: note = Description of Unknown: uncultivated organism sequence
  REGION 1..550: note = Category: MG81 effectors
  REGION 1..550: note = Description: MG81-130 effector
MGWKSKGRGGTRVDNEEKEKDGATCCLTLPLKLEKWQSDHLEKRFEIARQLYNTLVHAELKKKCQVVRMPEYQEIMKMIDAASNQKEKWALEKKRKAFLEENGFSRNAFKADMEKYYKHFNDNIGANVALHGITAQVWIAFDKVFVDNYKQKGKVHFKKPGELCSVQGYSQKKSGGKEIMFREDRIIWNQQGNRDRKKVKREFLLKLSPDNPYEAEMLKRHVKFVRILRKDGKTKPHWYAQLVLEGKPAVKRDPASGAPKHPIGHGVVGIDIGTRTLAYSTDSEVNLLELADRVQNIEQEKRRLQRKMDRSRRAMNPGNYKPDGSIKQGVKLTWNNSKRYKRIQHQYAMIQHHQADIRKQQHNELANYLLTLGDCFFVENMSYCDLAHRANKTEISEKTGRYKRKKRFGKSIANKAPAMLITMLKQKCQSRGLEGVKEVDTHVCASQYNHQTDTCIKKALENRWNIMPDGERIQRDLYSAFLLQHCRRDLPEYNRKELQKEFGEELYRVFDREALQRDYPQFVAYHHMTIQRLSELPHTIPSMGIRRIIS

SEQ ID NO: 1853 - protein, 536 aa, unidentified
  REGION 1..536: note = Description of Unknown: uncultivated organism sequence
  REGION 1..536: note = Category: MG81 effectors
  REGION 1..536: note = Description: MG81-131 effector
MNNEEKEKDGATCCLTLPLKLEKWQSDHLEKRFEIARQLYNTLVHAELKRIHRIERMPEYREIERLIEATTDKKEKWALKNQKKQFLRKNGINRNTFTTDMKRLYKHFNDNIGSNVAQHGIVSQVLTAFEKVYIENQSGEVHFKKPGDLRSVQGYSQKKSGGVEIMFREGKIIWNQQGNNDRKGVAREFPLKLSPDNSYEAEMLKKHVKYVRILRNEGKTKPHWYAQLVLEGTPVAKYDPISGAPKHPVGHGVVGIDIGTRTLAYSTDKEVNLLELADHVQNIEQEKRRLQRKMDRSRRATNPENYNPDGTFKRGVKLTRNKSKRYRRIQHQLAMIQHHQADIRKQQHNELANYLLTLGDCFFVENMSYCDLVHRANKTEISEKTGRYKRKKRFGKSIANKAPAMLITMLKQKCQSRGLKGVKEVDTHVRASQYNHQTDTCIEKALENRWNVMPDGERIQRDLYSAFLLQHCKQGLPEYNRKELKKEFGEELYRVFDREALQRDYPQFVAYHHMTIQRLSELPHTIPSMGIRRIIS

SEQ ID NO: 1854 - protein, 534 aa, unidentified
  REGION 1..534: note = Description of Unknown: uncultivated organism sequence
  REGION 1..534: note = Category: MG81 effectors
  REGION 1..534: note = Description: MG81-132 effector
MGWKSKGRGGKRVKKSSTDTCCLTLPLKLEKWQSDRLEKRFEIGRQIYNTVVRAELKKLHQVERTPQYREIEQKLKEAKQEEAKELWKKRTQLLSKSGFSEYGFKSDMKYYYQHFKENIGSSVAVHGIASQVWTAFEKVLFSKDGKMVHFKKKGELSSLRGYSQAGKSGGIEIIFRGSYVEWKGLKLPLKLSSNNDYETEMLSKRVKYVRILRKEGKTKPHWYAQLVLEGKPAIKRDPASGAPKHPVGHGVVGIDIGTRTLAYSADSKVDLIELADRVQNIELEKMLLQRKLDRSRRATNPENYKPDGTIKKGVKLTRNKSKRYRKIQHQLAMLQHRQADIRKRQHNELANYLLTLGDCFFVEDMDYRALTRKAKKTEISEKTGRYKRKKRFGKSIANKAPSMLIALLDQKCKSLNLEGVKKVDTAVKASQYNHQTDECKAKELKERWNIMPDGERIQRDLYSAFLLQHCKRGLPEYNRKKLQEAFGNELYRVFDREALQRDYPKFVEYHRETIQRLSALPKTIASMGIRRIIS

SEQ ID NO: 1855 - protein, 334 aa, unidentified
  REGION 1..334: note = Description of Unknown: uncultivated organism sequence
  REGION 1..334: note = Category: MG81 effectors
  REGION 1..334: note = Description: MG81-133 effector
MLKKHVKFVRILRNEGKTKPHWYAQLVLEGKPAIKRDPASGTPKHPVGHGVVGIDIGTRTLAYSTDSEVNLLELADRVQNIEQEKRRLQRKMDRSRRAMNPGNYKPDGSIKQGVKLTWNNSKRYKQIQHQYAMIQHHQADIRKQQHNELANYLLTLGDCFFVEDMDYRALTRKAKKTEISEKTGRYKRKKRFGKSIANKAPSMLIALLDQKCKSLNLEGVKKVDTAVKASQYNHQTDECKAKELKERWNIMPDGERIQRDLYSAFLLQHCKRGLPEYNRKKLQETFGNELYRVFDREALQRDYPKFVEYHRETIQRLSALPKTIASMGIRRSIS

SEQ ID NO: 1856 - protein, 538 aa, unidentified
  REGION 1..538: note = Description of Unknown: uncultivated organism sequence
  REGION 1..538: note = Category: MG81 effectors
  REGION 1..538: note = Description: MG81-134 effector
MNNEEKEKDGATCCLTLPLKLEKWQSDHLEKRFEIARQLYNTLVHAELKKKCQVERMPEYQEIMKMIDAASNQKEKWALEKKRKAFLEENGFSRNAFKADMEKYYKHFNDNIGANVALHGITAQVWIAFDKVFVDNYKQKGKVHFKKPGELCSVQGYSQKKSGGKEIMFREDRIIWNQQGNRDRKKVKREFLLKLSPDNPYEAEMLKRHVKFVRILRKDGKTKPHWYAQLVLEGKPAVKRDSASGAPKHPIGHGVVGIDIGTRTLAYSTDKEVNLLELADHVQNIEQEKRRLQRKMDRSRRATNPENYNPDGTFKRGVKLTRNKSKRYRRIQHQLAMIQHHQADIRKQQHNELANYLLTLGDCFFVENMSYCDLVHRANKTEISEKTGRYKRKKRFGKSIANKAPAMLITMLKQKCQSRGLEGVKEVDTHVRASQYNHQTDTCIEKALENRWNVMPDGERIQRDLYSAFLLQHCKQGLPEYNRKELKKEFGEELYRVFDREALQRDYPQFVAYHHMTIQRLSELPHTIASMGIRRSIS

SEQ ID NO: 1857 - protein, 554 aa, unidentified
  REGION 1..554: note = Description of Unknown: uncultivated organism sequence
  REGION 1..554: note = Category: MG81 effectors
  REGION 1..554: note = Description: MG81-135 effector
MNNEEKEKDGATCCLTLPLKLEKWQSDHLEKRFEIARQLYNTLVHAELKRIHRIERMPEYREIERQIEATTDKKEKWALKNQKKQFLRKNGINRNTFTTDMKRLYKHFNDNIGSNVAQHGIVSQVLTAFEKVYIENQSGEVHFKKPGDLRSVQGYSQKESGGVEIMFRNGKIIWTQQENDDRKKSPKYQQRKKRQNYKGVKGIAREFPVVFSKNNPYEAEMLKKHVKFVRILRKDGKTKPHWYAQLVLEGTPVAKYDPISGAPKHPVGHGVVGIDIGTRTLAYSADSKVDLIELADRVQNIEQEKLLLQRKLDRSRRATNPENYKPDGTIKKGVKLTRNKSKRYRKIQHQLAMLQHRQADIRKRQHNELANYLLTLGDCFFVEDMDYRALTRKAKKTEISEKTGRYKRKKRFGKSIANKAPSMLIALLDQKCKSLNLEGVKKVDTAVKASRYNHQTDECKAKELKERWNIMPDGERIQRDLYSAFLLQHCRRDLPEYNRKKLQETFGNELYRVFDREALQRDYPKFVEYHRKTIQRLSALPKTIASMGIRRIIS

SEQ ID NO: 1858 - protein, 538 aa, unidentified
  REGION 1..538: note = Description of Unknown: uncultivated organism sequence
  REGION 1..538: note = Category: MG81 effectors
  REGION 1..538: note = Description: MG81-136 effector
MNNEEKEKDGATCCLTLPLKLEKWQSDHLEKRFEIARQLYNTLVHAELKKKCQVERMPEYQEIMKMIDAASNQKEKWALEKKRKAFLEENGFSRNAFKADMEKYYKHFNDNIGANVALHGITAQVWIAFDKVFVDNYKQKGKVHFKKPGELCSVQGYSQKKSGGKEIMFREDRIIWNQQGNRDRKKVKREFLLKLSPDNPYEAEMLKRHVKFVRILRKDGKTKPHWYAQLVLEGKPAVKRDPASGAPKHPIGHGVVGIDIGTRTLAYSTDKEVNLLELADHVQNIEQEKRRLQRKMDRSRRATNPENYNPDGTFKRGVKLTRNKSKRYRRIQHQLAMIQHHQADIRKQQHNELANYLLTLGDCFFVENMSYCDLVHRANKTEISEKTGRYKRKKRFGKSIANKAPAMLITMLKQKCQSRGLEGVKEVDTHVRASQYNHQTDTCIEKALENRWNVMPDGERIQRDLYSAFLLQHCKQGLPEYNRKELKKEFGEELYRVFDREALQRDYPQFVAYHHMTIQRLSELPHTIPSMGIRRIIS

SEQ ID NO: 1859 - protein, 522 aa, unidentified
  REGION 1..522: note = Description of Unknown: uncultivated organism sequence
  REGION 1..522: note = Category: MG81 effectors
  REGION 1..522: note = Description: MG81-137 effector
MKRSSTDTCCLTLPLKLEKWQSDRLEKRFEIGRQIYNTIVHAELKKLRKLERTQQYQEIEQKLENAKQEETKELWKKKRQLLDQNGLSENHFKADMKYYYPHFKDNIASSVAVHGIASQAWTAFEKVLLSKDGKMVHFKKKGELSSLRGYSQAGKSGGIEIIFRGSYVEWKGLKLPLQLSPNNEYETEMLSKRVKYVRILRKDGKTKTHWYAQLVLEGKPAIKRDPASGTPKHPVGHGVVGIDIGTRTLAYSTDKEVNLLELADHVQNIEQEKRRLQRKMDRSRRATNPENYNPDGTFKRGVKLTRNKSKRYRRIQHQLAMIQHHQADIRKQQHNELANYLLTLGDCFFVENMSYCDLVHRANKTEISEKTGRYKRKKRFGKSIANKAPAMLITMLKQKCQSRGLEGVKEVDTHVRASQYNHQTDTCIEKALENRWNVMPDGERIQRDLYSAFLLQHCKQGLPEYNRKELKKEFGEELYRVFDREALQRDYPQFVAYHHMTIQRLSELPHTIPSMGIRRIIS

SEQ ID NO: 1860 - protein, 538 aa, unidentified
  REGION 1..538: note = Description of Unknown: uncultivated organism sequence
  REGION 1..538: note = Category: MG81 effectors
  REGION 1..538: note = Description: MG81-138 effector
MDNEEKEKDGATCCLTLPLKLEKWQSDHLEKRFEIARQLYNTLVHAELKKKCQVERMPEYQEIMKMIDAASNQKEKWALEKKRKAFLEENGFNRNAFKADMEKYYKHFNDNIGANVALHGITAQVWIAFDKVFVDNYKQKGKVHFKKPGELCSVQGYSQKKSGGKEIMFREDRIIWNQQGNRDRKKVKREFLLKLSPDNPYEAEMLKRHVKFVRILRKDGKTKPHWYAQLVLEGKPAVKRDPASGAPKHPIGHGVVGIDIGTRTLAYSTDKEVNLLELADHVQNIEQEKRRLQRKMDRSRRATNPENYNPDGTFKRGVKLTRNKSKRYRRIQHQLAMIQHHQADIRKQQHNELANYLLTLGDCFFVENMSYCDLVHRANKTEISEKTGRYKRKKRFGKSIANKAPAMLITMLKQKCQSRGLEGVKEVDTHVRASQYNHQTDTCIEKALENRWNVMPDGERIQRDLYSAFLLQHCKQGLPEYNRKELKKEFGEELYRVFDREALQRDYPQFVAYHHMTIQRLSELPHTIPSMGIRRIIS

SEQ ID NO: 1861 - protein, 534 aa, unidentified
  REGION 1..534: note = Description of Unknown: uncultivated organism sequence
  REGION 1..534: note = Category: MG81 effectors
  REGION 1..534: note = Description: MG81-139 effector
MGWKSTGRGGKRVKRSSTDTCCLTLPLKLEKWQSDRLEKRFEIGRQIYNTIVHAELKKLRKLERTQQYQEIEQKLENAKQEETKELWKKKRQLLDQNGLSENHFKADMKHYYPHFKDNIASSVAVHGIASQAWTAFEKVLLSKDGKMVHFKKKGELSSLRGYSQAGKSGGIEIIFRGSYVEWKGLKLPLQLSPNNEYETEMLSKRVKYVRILRKDGKTKTHWYAQLALEGKPAVKRDSISGAPKHPVGHGVVGIDIGTRTLAYSTDSEVNLLELADRVQNIEQEKRRLQRKMDRSRRAMNPGNYKPDGSIKQGVKLTWNNSKRYKRIQHQYAMIQHHQADIRKQQHNELANYLLTLGDCFFVEDMDYRALTRKAKKTEISEKTGRYKRKKRFGKSIANKAPSMLIALLDQKCKSLNLEGVKKVDTAVKASQYNHQTDECKAKELKERWNIMPDGERIQRDLYSAFLLQHCRRDLPEYNRKKLQEAFGNELYRVFDREALQRDYPKFVEYHRKTIQRLSALPKTIASMGIRRIIS

SEQ ID NO: 1862 - protein, 512 aa, unidentified
  REGION 1..512: note = Description of Unknown: uncultivated organism sequence
  REGION 1..512: note = Category: MG81 effectors
  REGION 1..512: note = Description: MG81-140 effector
MPTKQKEDSNRCVLTLPLLTEPWQEHIIEKRFKIIEHLKNQLISIELRKLKNLQRTKAYKNLIKQIESVPKSERTVLYKERNKMLKDAGFSQYTFMDDMAGKKSLMQKHFESHINVQIAHKAAIDVWSSFEKFLFGTGQMIHYQKRGTLSSVASKSPKTGMFYYSDENIFKWSGGGTKPKGGIILCLRVASVKTNYEKEMVANNEIKYYRVVRKWMKTKYKYYLQITFAGKPADKHREISTGRVGIDIGTQTIAIASDKSVKLLELADKVNKNHIKKCELQRKLDRSRRYTNPDNFNPDGTVKRGTKGHKLKWNKSKHYLEIVGKIRELERKNADIRKYQHTCLANDILAMGNQIYIEPMNYKGLQKRAKETQVDEKGRYKKKKRFGKSLANKAPAMFVTILKTKVEQHGGEVYEVDIMSYRASQCDHTTGEYTKHGLNDRWRILGNGDKVQRDLYSAFLIKNSNKTHDEIDLDKCSKTYDSFKKLHDKEIENIRNEVKLRERRNISSYGIA

SEQ ID NO: 1863 - protein, 534 aa, unidentified
  REGION 1..534: note = Description of Unknown: uncultivated organism sequence
  REGION 1..534: note = Category: MG81 effectors
  REGION 1..534: note = Description: MG81-141 effector
MGWKSKGRGGKRVKRSSTDTCCLTLPLKLEKWQSDRLEKRFEIGRQIYNTIVHAELKKLRKLERTQQYQEIEQKLENAKQEETKELWKKKRQLLDQNGLSENHFKADMKHYYPHFKDNIASSVAVHGIASQAWTAFEKVLLSKDGKMVHFKKKGELSSLRGYSQAGKSGGIEIIFRGSYVEWKGLKLPLKLSPDNDYETEMLSKRVKYVRILRKDGKTKTHWYAQLALEGKPAVKRDSISGAPKHPVGHGVVGIDIGTRTLAYSADSKVDLIELADRVQNIEQEKMLLQRKLDRSRRATNPENYKPDGSIKQGVKLTWNNSKRYKRIQHQYAMIQHHQADIRKQQHNELANYLLTLGDCFFVEDMDYRALTRKAKKTEISEKTGRYKRKKRFGKSIANKAPSMLIALLDQKCKSLNLEGVKKVDTAVKASQYNHQTDECKAKELKERWNIMPDGERIQRDLYSAFLLQHCRRDLPEYNRKKLQEAFGNELYRVFDREALQRDYPKFVEYHRKTIQRLSALPKTIASMGIRRIIS

SEQ ID NO: 1864 - protein, 566 aa, unidentified
  REGION 1..566: note = Description of Unknown: uncultivated organism sequence
  REGION 1..566: note = Category: MG81 effectors
  REGION 1..566: note = Description: MG81-142 effector
MGWKSKGRGGTLVDNEEKKEDGATCCLTLPLKLEKWQSDHLEKRFEIARQLYNTLVHAELKRIHRIERMPEYREIERQIEATTDKKEKWALKNQKKQFLRKNGINRNTFTTDMKRLYKHFNDNIGSNVAQHGIVSQVLTAFEKVYIENQSGEVHFKKPGDLRSVQGYSQKESGGKEIMFRNGKIIWNQQENDDRKKSPKYQQRKKRQNYKGVKGIAREFPVVFSKNNPYEAEMLTKHVKFVRILRKDGKTKPHWYAQLVLEGTPVAKYDPISGAPKHPVGHGVVGIDIGTRTLAYSTDKEVNLLELADRVQNIEQEKRRLQRKMDRSRRAMNPENYNSDGTFKRGVKLTRNKSKRYRRIQHQLAMIQHHQADIRKQQHNELANYLLTLGDCFFVENMSYCDLVHRANKTEISEKTGRYKRKKRFGKSIANKAPAMLITMLKQKCQSRGLKGVKEVDTHVRASQYNHQTDTCIEKALENRWNVMPDGERIQRDLYSAFLLQHCKQGLPEYNRKELKKEFGEELYRVFDREALQRDYPQFVAYHHMTIQRLSELPHTIPSMGIRRIIS

SEQ ID NO: 1865 - protein, 550 aa, unidentified
  REGION 1..550: note = Description of Unknown: uncultivated organism sequence
  REGION 1..550: note = Category: MG81 effectors
  REGION 1..550: note = Description: MG81-143 effector
MGWKSKGRGVTLVDNEEKKEDGATCCLTLPLKLEKWQSDHLEKRFEIARQLYNTLVHAELKKKCQVERMPEYQEIMKMIDAASNQKEKWALEKKRKAFLEENGFSRNAFKADMEKYYKHFNDNIGANVALHGITAQVWIAFDKVFVDNYKQKGKVHFKKPGELCSVQGYSQKKSGGKEIMFREDRIIWNQQGNRDRKKVKREFLLKLSPDNPYEAEMLKRHVKFVRILRKDGKTKPHWYAQLVLEGKPAVKRDPASGAPKHPIGHGVVGIDIGTRTLAYSTDKEVNLLELADHVQNIEQEKRRLQRKMDRSRRATNPENYNPDGTFKRGVKLTRNKSKRYRRIQHQLAMIQHHQADIRKQQHNELANYLLTLGDCFFVENMSYCDLVHRANKTEISEKTGRYKRKKRFGKSIANKAPAMLITMLKQKCQSRGLEGVKEVDTHVRASQYNHQTDTCIEKALENRWNVMPDGERIQRDLYSAFLLQHCKQGLPEYNRKELKKEFGEELYRVFDREALQRDYPQFVAYHHMTIQRLSELPHTIPSMGIRRIIS

SEQ ID NO: 1866 - protein, 534 aa, unidentified
  REGION 1..534: note = Description of Unknown: uncultivated organism sequence
  REGION 1..534: note = Category: MG81 effectors
  REGION 1..534: note = Description: MG81-144 effector
MGWKSKGRGGTLVKRSSTDTCCLTLPLKLEKWQSDRLEKRFEIGRQIYNTIVHAELKKLRKLERTQQYQEIEQKLENAKQEETKELWKKKRQLLDQNGLSENHFKADMKYYYPHFKDNIASSVAVHGIASQAWTAFEKVLLSKDGKMVHFKKKGELSSLRGYSQAGKSGGIEIIFRGSYVEWKGLKLPLQLSPNNEYETEMLSKRVKYVRILRKDGKTKTHWYAQLALEGKPAVKRDSISGAPKHPVGHGVVGIDIGTRTLAYSTDSEVNLLELADRVQNIEQEKRRLQRKMDRSRRAMNPGNYKPDGSIKQGVKLTWNNSKRYKRIQHQYAMIQHHQADIRKQQHNELANYLLTLGDCFFVEDMDYRALTRKAKKTEISEKTGRYKRKKRFGKSIANKAPSMLIALLDQKCKSLNLEGVKKVDTAVKASQYNHQTDECKAKELKERWNIMPDGERIQRDLYSAFLLQHCRRDLPEYNRKKLQEAFGNELYRVFDREALQRDYPKFVEYHRKTIQRLSALPKTIASMGIRRIIS

SEQ ID NO: 1867 - protein, 427 aa, unidentified
  REGION 1..427: note = Description of Unknown: uncultivated organism sequence
  REGION 1..427: note = Category: MG81 effectors
  REGION 1..427: note = Description: MG81-145 effector
MKYYYQHFKENIGSSVAVHGIASQVWTAFEKVLFSKDGKMVHFKKKGELSSLRGYSQAGKSGGIEIIFRGSYVEWKGLKLPLKLSPDNDYETEMLSKRVKYVRILRKEGKTKPHWYAQLVLEGKPAIKRDPASGAPKHPVGHGVVGIDIGTRTLAYSADSKVDLIELADRVQNIEQEKMLLQRKLDRSRRATNPENYKPDGTIKKGVKLTRNKSKRYRKIQHQLAMLQHRQADIRKRQHNELANYLLTLGDCFFVEDMDYRALTRKAKKTEISEKTGRYKRKKRFGKSIANKAPSMLIALLDQKCKSLNLEGVKKVDTAVKASQYNHQTDECKAKELKERWNIMPDGERIQRDLYSAFLLQHCKRGLPEYNRKKLQEAFGNELYRVFDREALQRDYPKFVEYHRETIQRLSALPKTIASMGIRRIIS

SEQ ID NO: 1868 - protein, 534 aa, unidentified
  REGION 1..534: note = Description of Unknown: uncultivated organism sequence
  REGION 1..534: note = Category: MG81 effectors
  REGION 1..534: note = Description: MG81-146 effector
MGWKSKGRGGTRVKRSSTDTCCLTLPLKLEKWQSDRLEKRFEIGRQIYNTIVHAELKKLRKLERTQQYQEIEQKLENAKQEETKELWKKKRQLLDQNGLSEDHFKADMKYYYPHFKDNIASSVAVHGIASQAWTAFEKVLLSKDGKMVHFKKKGELSSLRGYSQAGKSGGIEIIFRGSYVEWKGLKLPLQLSPNNEYETEMLSKRVKYVRILRKDGKTKTHWYAQLALEGKPAVKRDSISGAPKHPVGHGVVGIDIGTRTLAYSTDSAVNLLELADRVQNIEQEKRRLQRKMDRSRRAMNPGNYKPDGSIKQGVKLTWNNSKRYKRIQHQYAMIQHHQADIRKQQHNELANYLLTLGDCFFVENMSYCDLAHRANKTEISEKTGRYKRKKRFGKSIANKAPAMLITMLKQKCQSRGLKGVKEVDTHVRASQYNHQTDTCIEKALENRWNVMPDGERIQRDLYSAFLLQHCKQGLPEYNRKELKKEFGEELYRVFDREALQRDYPQFVAYHHMTIQRLSELPHTIPSMGIRRIIS

SEQ ID NO: 1869 - protein, 538 aa, unidentified
  REGION 1..538: note = Description of Unknown: uncultivated organism sequence
  REGION 1..538: note = Category: MG81 effectors
  REGION 1..538: note = Description: MG81-147 effector
MDNEEKKEDGATCCLTLPLKLEKWQSDHLEKRFEIARQLYNTLVHAELKKKCQVERMPEYQEIMKMIDAASNQKEKWALEKKRKAFLEENGFSRNAFKADMEKYYKHFNDNIGANVALHGITAQVWIAFDKVFVDNYKQKGKVHFKKPGELCSVQGYSQKKSGGKEIMFREDRIIWNQQGNRDRKKVKREFLLKLSPDNPYEAEMLKRHVKFVRILRKDGKTKPHWYAQLVLEGKPAVKRDPASGAPKHPVGHGVVGIDIGTRTLAYSTDKEVNLLELADRVQNIEQEKRRLQRKMDRSRRATNPENYNPDGTFKRGVKLTRNKSKRYRRIQHQLAMIQHHQADIRKQQHNELANYLLTLGDCFFVENMSYCDLVHRANKTEISEKTGRYKRKKRFGKSIANKAPAMLITMLKQKCQSRGLEGVKEVDTHVRASQYNHQTDICIEKALENRWNVMPDGERIQRDLYSAFLLQHCKQGLPEYNRKELKKEFGEELYRVFDREALQRDYPQFVAYHHMTIQRLSELPHTIPSMGIRRIIS

SEQ ID NO: 1870 - protein, 480 aa, unidentified
  REGION 1..480: note = Description of Unknown: uncultivated organism sequence
  REGION 1..480: note = Category: MG81 effectors
  REGION 1..480: note = Description: MG81-148 effector
MPEYREIERLIEATTDKKEKWALKNQKKQFLRKNGINRNTFTTDMKRLYKHFNDNIGSNVAQHGIVSQVLTAFEKVYIENQSGEVHFKKPGDLRSVQGYSQKKSGGVEIMFREGKIIWNQQGNNDRKGVAREFPLKLSPDNSYEAEMLKKHVKFVRILRKEGKTKSHWYAQLVLEGKPTVKRDPISGAPKHPVGHGVVGIDIGTRTLAYSTDSEVNLLELADRVQNIEQEKRRLQRKMDRSRRAMNPENYNSDGTFKRGVKLTRNKSKRYRRIQHQLAMIQHHQADIRKQQHNELANYLLTLGDCFFVENMSYCDLVHRANKTEISEKTGRYKRKKRFGKSIANKAPAMLITMLKQKCQSRGLEGVKEVDTHVRASQYNHQTDTCIEKALENRWNVMPDGERIQRDLYSAFLLQHCKQGLPEYDRKELKKEFGEELYRVFDREALQRDYPQFVAYHHMTIQRLSELPHTIPSMGIRRIIS

SEQ ID NO: 1871 - protein, 534 aa, unidentified
  REGION 1..534: note = Description of Unknown: uncultivated organism sequence
  REGION 1..534: note = Category: MG81 effectors
  REGION 1..534: note = Description: MG81-149 effector
MGWKSKGRGGKRVKRSSTDTCCLTLPLKLEKWQSDRLEKRFEIGRQIYNTIVHAELKKLRKLERTQQYQEIEQKLENAKQEETKELWKKKRQLLDQNGLSENHFKADMKYYYPHFKDNIASSVAVHGIASQAWTAFEKVLLSKDGKMVHFKKKGELSSLRGYSQAGKSGGIEIIFRGSYVEWKGLKLPLQLSPNNEYETEMLSKRVKYVRILRKDGKTKTHWYAQLALEGKPAVKRDSISGAPKHPVGHGVVGIDIGTRTLAYSADSKVDLIELADRVQNIEQEKMLLQRKLDRSRRATNPENYKPDGSIKQGVKLTWNNSKRYKRIQHQYAMIQHHQADIRKQQHNELANYLLTLGDCFFVEDMDYRALTRKAKKTEISEKTGRYKRKKRFGKSIANKAPSMLIALLDQKCKSLNLEGVKKVDTAVKASQYNHQTDECKAKELKERWNIMPDGERIQRDLYSAFLLQHCRRDLPEYNRKKLQEAFGNELYRVFDREALQRDYPKFVEYHRKTIQRLSALPKTIASMGIRRIIS

SEQ ID NO: 1872 - protein, 548 aa, unidentified
  REGION 1..548: note = Description of Unknown: uncultivated organism sequence
  REGION 1..548: note = Category: MG81 effectors
  REGION 1..548: note = Description: MG81-150 effector
MEWKSTGRGGTLVDNEEKKEDGATCCLTLPLKLEKWQSDHLEKRFEIARQLYNTLVHAELKRIHRIERMPEYREIERQIEATTDKKEKWALKNQKKQFLRKNGINRNTFTTDMKRLYKHFNDNIGSNVAQHGIVSQVLTAFEKVYIENQSGEVHFKKPGDLRSVQGYSQKKSGGVEIMFREGKIIWNQQGNNDRKGVAREFPLKLSPDNSYEAEMLKKHVKFVRILRNEGKTKPHWYAQLVLEGKPAIKRDPASGAPKHPVGHGVVGIDIGTRTLAYSTDSKVDLIELADRVQNTEQEKMLLQRKLDRSRRATNPENYKPDGTIKKGVKLTRNKSKRYRKIQHQLAMLQHRQADIRKRQHNELANYLLTLGDCFFVEDMDYRALTRKAKKTEISEKTGRYKRKKRFGKSIANKAPSMLIALLDQKCKSLNLEGVKKVDTAVKASQYNHQTDECKAKELKERWNIMPDGERIQRDLYSAFLLQHCRRDLPEYNRKKLQEAFGNEVYRVFDREALQRDYPKFVEYHRETIQRLSALPKTIASMGIRRIIS

SEQ ID NO: 1873 - protein, 538 aa, unidentified
  REGION 1..538: note = Description of Unknown: uncultivated organism sequence
  REGION 1..538: note = Category: MG81 effectors
  REGION 1..538: note = Description: MG81-151 effector
MNNEEKEKEGATCCLTLPLKLEKWQSDHLEKRFEIARQLYNTLVHAELKKKCQVERMPEYQEIMKMIDTASNQKEKWALEKKRKAFLEENGFSRNAFKADMEKYYKHFNDNIGANVALHGITAQVWIAFDKVFVDNYKQKGKVHFKKPGELCSVQGYSQKKSGGKEIMFREDRIIWNQQGNRDRKKVKREFLLKLSPNNPYEAEMLKRHVKFVRILRKDGKTKPHWYAQLVLEGKPAVKRDPISSAPKHPVGHGVVGIDIGTRTLAYSTDKEVNLLELADRVQNIEQEKRRLQRKMDRSRRAMNPENYNSDGTFKRGVKLTRNKSKRYRRIQHQLAMIQHHQADIRKQQHNELANYLLTLGDCFFVENMSYCDLAHRANKTEISEKTGRYKRKKRFGKSIANKAPAMLITMLKQKCQSRGLEGVKEVDTHVCASQYNHQTDTCIKKALENRWNIMPDGERIQRDLYSAFLLQHCRRDLPEYNRKELQKEFGEELYRVFDREALQRDYPQFVAYHHMTIQRLSELPHTIPSMGIRRIIS

SEQ ID NO: 1874 - protein, 534 aa, unidentified
  REGION 1..534: note = Description of Unknown: uncultivated organism sequence
  REGION 1..534: note = Category: MG81 effectors
  REGION 1..534: note = Description: MG81-152 effector
MGWKSKGRGGKRVKRSSTDTCCLTLPLKLEKWQSDRLEKRFEIGRQIYNTIVHAELKKLRKLERTQQYQEIEQKLENAKQEETKELWKKKRQLLDQNGLSENHFKADMKHYYPHFKDNIASSVAVHGIASQAWTAFEKVLLSKDGKMVHFKKKGELSSLRGYSQAGKSGGIEIIFRGSYVEWKGLKLPLQLSPNNEYETEMLSKRVKYVRILRKDGKTKTHWYAQLALEGKPAVKRDSISGAPKHPVGHGVVGIDIGTRTLAYSTDSEVNLLELADRVQNIEQEKRRLQRKMDRSRRAMNPGNYKPDGSIKQGVKLTWNNSKRYKRIQHQYAMIQHHQADIRKQQHNELANYLLTLGDCFFVEDMDYRALTRKAKKTEISEKTGRYKRKKRFGKSIANKAPSMLIALLDQKCKSLNLEGVKKVDTAVKASQYNHQTDECKAKELKERWNIMPDGERIQRDLYSAFLLQHCRRDLPEYNRKKLQEAFGNELYRVFDREALQRDYPKFVEYHRKTIQRLSALPKTIASMGIRRIIS

SEQ ID NO: 1875 - protein, 534 aa, unidentified
  REGION 1..534: note = Description of Unknown: uncultivated organism sequence
  REGION 1..534: note = Category: MG81 effectors
  REGION 1..534: note = Description: MG81-153 effector
MGWKSKGRGGKRVKRSSTDTCCLTLPLKLEKWQSDRLEKRFEIGRQIYNTIVHAELKKLRKLERTQQYQEIEQKLENAKQEETKELWKKKRQLLDQNGLSENHFKADIKHYYPHFKDNIASSVAVHGIASQAWTAFEKVLLSKDGKMVHFKKKGELSSLRGYSQTGKSGGIEIIFRGSYVEWKGLKLPLKLSPDNDYETEMLSKRVKYVRILRQDGKTKPHWYAQLVLEGKPAVKRDPISGAPKHPIGRGVVGIDIGTRTLAYSADSKVDLIELADRVQNIEQEKLLLQRKLDRSRRATNPENYKPDGTIKKGVKLTRNKSKRYRRIQHQLAMIQHHQADIRKQQHNELANYLLTLGDCFFVEDMDYRALTRKAKKTEISEKTGRYKRKKRFGKSIANKAPAMLITMLKQKCQSRGLKGVKEVDTHVRASQYNHQTDTCIEKALENRWNVMPDGERIQRDLYSAFLLQHCKQGLPEYNRKELKKEFGEELYRVFDREALQRDYPQFVAYHHMTIQRLSELPHTIPSMGIRRIIS

SEQ ID NO: 1876 - protein, 550 aa, unidentified
  REGION 1..550: note = Description of Unknown: uncultivated organism sequence
  REGION 1..550: note = Category: MG81 effectors
  REGION 1..550: note = Description: MG81-154 effector
MGWKSKGRGGTLVDNEEKKEDGATCCLTLPLKLEKWQSDHLEKRFEIARQLYNTLVHAELKKKCQVERMPEYQEIMKMIDAASNQKEKWALEKKRKAFLEENGFSRNAFKADMEKYYKHFNDNIGANVALHGITAQVWIAFDKVFVDNYKQKGKVHFKKPGELCSVQGYSQKKSGGKEIMFREDRIIWNQQGNRDRKKVKREFLLKLSPDNPYEAEMLKRHVKFVRILRKDGKTKPHWYAQLVLEGKPAVKRDPASGAPKHPIGHGVVGIDIGTRTLAYSTDKEVNLLELADHVQNIEQEKRRLQRKMDRSRRATNPENYNPDGTFKRGVKLTRNKSKRYRRIQHQLAMIQHHQADIRKQQHNELANYLLTLGDCFFVENMSYCDLVHRANKTEISEKTGRYKRKKRFGKSIANKAPAMLITMLKQKCQSRGLEGVKEVDTHVRASQYNHQTDTCIEKALENRWNVMPDGERIQRDLYSAFLLQHCKQGLPEYNRKELKKEFGEELYRVFDREALQRDYPQFVAYHHMTIQRLSELPHTIPSMGIRRIIS

SEQ ID NO: 1877 - protein, 538 aa, unidentified
  REGION 1..538: note = Description of Unknown: uncultivated organism sequence
  REGION 1..538: note = Category: MG81 effectors
  REGION 1..538: note = Description: MG81-155 effector
MDNEEKEKDGATCCLTLPLKLEKWQSDHLEKRFEIARQLYNTLVHAELKKKCQVERMPEYQEIMKMIDAASNQKEKWALEKKRKAFLEENGFSRNTFKADMEKYYKHFNDNIGANVALHGITAQVWIAFDKVFVDNYKQKGKVHFKKPGELCSVQGYSQKKSGGKEIMFREDRIIWNQQGNRDRKKVKREFLLKLSPNNPYEAEMLKRHVKFVRILRKDGKTKPHWYAQLVLEGKPAVKRDPISSAPKHPVGHGVVGIDIGTRTLAYSTDKEVNLLELADRVQNIEQEKRRLQRKMDRSRRAMNPENYNSDGTFKRGVKLTRNKSKRYRRIQHQLAMIQHHQADIRKQQHNELANYLLTLGDCFFVENMSYCDLAHRANKTEISEKTGRYKRKKRFGKSIANKAPAMLITMLKQKCQSRGLEGVKEVDTHVCASQYNHQTDTCIKKALENRWNIMPDGERIQRDLYSAFLLQHCRRDLPEYNRKELQKEFGEELYRVFDREALQRDYPQFVAYHHMTIQRLSELPHTIPSMGIRRIIS

SEQ ID NO: 1878 - protein, 534 aa, unidentified
  REGION 1..534: note = Description of Unknown: uncultivated organism sequence
  REGION 1..534: note = Category: MG81 effectors
  REGION 1..534: note = Description: MG81-156 effector
MGWKSKGRGGKRVKKSSTDTCCLTLPLKLEKWQSDRLEKRFEIGRQIYNTVVRAELKKLHQVERTPQYREIEQKLKEAKQEEAKELWKKRTQLLSKSGFSEYGFKSDMKYYYQHFKENIGSSVAVHGIASQVWTAFEKVLFSKDGKMVHFKKKGELSSLRGYSQAGKSGGIEIIFRGSYVEWKGLKLPLKLSSNNDYETEMLSRRVKYVRILRQDGKTKPHWYAQLVLEGKPAVKRDPISGASKHPIGHGAVGIDIGTRTLAYSADSKVDLIELADRVQNIEQEKLLLQRKLDRSRRATNPENYKPDGTIKKGVKLTRNKSKRYRKIQHQLAMLQHRQADIRKRQHNELANYLLTLGDCFFVEDMDYRALTRKAKKTEISEKTGRYKRKKRFGKSIANKAPSMLIALLDQKCKSLNLEGVKKVDTAVKASQYNHQTDECKAKELKERWNIMPDGEQIQRDLYSAFLLQHCRRDLPEYNRKKLQEAFGNELYRVFDREALQRDYPKFVEYHRKTIQRLSALPKTIASMGIRRIIS

SEQ ID NO: 1879 - protein, 511 aa, unidentified
  REGION 1..511: note = Description of Unknown: uncultivated organism sequence
  REGION 1..511: note = Category: MG81 effectors
  REGION 1..511: note = Description: MG81-157 effector
MAKCSTDTCCLTLPLRLEKWQEDRLAKRFEIARQIYNTMVRAELKKLRAMEQSEPYKANQEKIQALDWKTQADKQALKALYKERDKLLRDGGFSEYGFKSDIKNYYKHFNNNIGSSVAVHGIAPQVWTAFEKMLFKKEGKKVHFKKKGDIRSLRGYSVTGKSGGVEIIFRETYIEWKGLKLPLKLSPDNIYETQMLSYRVKYVRLLRKPGKRKDRWYAQLSLEGKPVIKYNPKTGEVRHPIGKGAVGLDIGPQTLAYSAATGADLVELANQVQNVEQEKRRLQRKLNRSRRATNPGNYADDGTIRRGIALTHNKSKRYLRTQQELKYLQHQQAEIRKRQHTELANHLLSLGDCFYVEKMVWTSLTHRAKETEISEKTGKIKRKKRFGKSVANKAPATLIGILQRKSAALGIPGVIEVPTSVKASQYNHQSGTYTPKPLSQRWNNMPDGERIQRDLYSAFLLQHYDPQTNTFDANSLHQDYPQFVQYHHDAVLRLYAMPKTPSSMGIKRSLR

SEQ ID NO: 1880 - protein, 522 aa, unidentified
  REGION 1..522: note = Description of Unknown: uncultivated organism sequence
  REGION 1..522: note = Category: MG81 effectors
  REGION 1..522: note = Description: MG81-158 effector
MKKSSTDTCCLTLPLKLEKWQSDRLEKRFEIGRQIYNTVVRAELKKLQQVERTPQYREIEQKLKEAKQEEAKELWKTRTQLLSKSGFSEYGFKSDMKYYYQHFKENIGSSVAVHGIASQVWTAFEKVLFSKDGKMVHFKKKGELSSLRGYSQAGKSGGIEIIFRGSYVEWKGLKLPLKLSPDNDYETEMLSKRVKYVRILRKEGKTKPHWYAQLVLEGKPAIKRDPASGAPKHPVGHGVVGIDIGTRTLAYSADSKVDLIELADRVQNIEQEKMLLQRKLDRSRRATNPENYKPDGTIKKGVKLTRNKSKRYRKIQHQLAMLQHRQADIRKRQHNELANYLLTLGDCFFVEDMDYRALTRKAKKTEISEKTGRYKRKKRFGKSIANKAPSMLIALLDQKCKSLNLEGVKKVDTAVKASQYNHQTDECKAKELKERWNIMPDGERIQRDLYSAFLLQHCRRDLPEYNRKKLQETFGNELYRVFDREALQRDYPQFVAYHHMTIQRLSALPKTIASMGIRRSIS

SEQ ID NO: 1881 - protein, 511 aa, unidentified
  REGION 1..511: note = Description of Unknown: uncultivated organism sequence
  REGION 1..511: note = Category: MG81 effectors
  REGION 1..511: note = Description: MG81-159 effector
MAKCSTDTCCLTLPLRLEKWQEDRLAKRFEIARQIYNTMVRAELKKLRAMEQSEPYKANQEKIQALDWKTQADKQALKALYKERDKLLQDGGFSERGFKSDIKNYYKHFNNNIGSNVAFHGIAPQVWAAFEKMLFKKEGKKVHFKKKGDIHSLRGYSVTGKSGGVEIIFRETYIEWKGLKLPLKLSPDNIYETQMLSYRVKYVRLLRKPGKRKDRWYAQLSLEGKPVIKYNPKTGEVRHPIGKGAVGLDIGPQTLAYSAATGADLVELANQVQNVEQEKRRLQRKLDRSRRATNPGNYADDGTIRRGIALTHNKSKRYLRTQQELKYLQHQQAEIRKRQHTELANHLLSLGDCFYVEKMVWTSLTHRAKETEISEKTGKIKRKKRFGKSVANKAPATLIEILQRKSAALGIPGVIEVPTSVKASQYNHQSGTYTPKPLSQRWNNMPDGERIQRDLYSAFLLQHYDPQTNTFDANSLHQDYPQFVQYHHDAVLRLYAMPKTPSSMGIKRSLR

SEQ ID NO: 1882 - protein, 538 aa, unidentified
  REGION 1..538: note = Description of Unknown: uncultivated organism sequence
  REGION 1..538: note = Category: MG81 effectors
  REGION 1..538: note = Description: MG81-160 effector
MNNEEKEKEGATCCLTLPLKLEKWQSDHLEKRFEIARQLYNTLVHAELKKKCQVERMPEYQEIMKMIDAASNQKEKWALEKKRKAFLEENGFSRNAFKADMEKYYKHFNDNIGANVALHGITAQVWIAFDKVFVDNYKQKGKVHFKKPGELCSVQGYSQKKSGGKEIMFREDRIIWNQQGNRDRKKVKREFLLKLSPDNPYEAEMLKRHVKFVRILRKDGKTKPHWYAQLVLEGKPAVKRDPASGAPKHPIGHGVVGIDIGTRTLAYSTDKEVNLLELADRVQNIEQEKRRLQRKMDRSRRATNPENYNPDGTFKRGVKLTRNKSKRYKRIQHQYAMIQHHQADIRKQQHNELANYLLTRGDCFFVENMSYCDLVHRANKTEISEKTGRYKRKKRFGKSIANKAPAMLITMLKQKCQSRGLEGVKEVDTHVRASQYNHQTDTCIEKALENRWNVMPDGERIQRDLYSAFLLQHCKQGLPEYNRKELKKEFGEELYRVFDREALQRDYPQFVAYHHMTIQRLSELPHTIPSMGIRRIIS

SEQ ID NO: 1883 - protein, 538 aa, unidentified
  REGION 1..538: note = Description of Unknown: uncultivated organism sequence
  REGION 1..538: note = Category: MG81 effectors
  REGION 1..538: note = Description: MG81-161 effector
MNNEEKEKDGATCCLTLPLKLEKWQSDHLEKRFEIARQLYNTLVHAELKKKCQVERMPEYQEIMKMIDTASNQKEKWALEKKRKAFLEENGFSRNAFKADMEKYYKHFNDNIGANVALHGITAQVWIAFDKVFVDNYKQKGKVHFKKPGELCSVQGYSQKKSGGKEIMFREDRIIWNQQGNRDRKKVKREFLLKLSPDNPYEAEMLKRHVKFVRILRKDGKTKPHWYAQLVLEGKPAVKRDPASGAPKHPIGHGVVGIDIGTRTLAYSTDKEVNLLELADRVQNIEQEKRRLQRKMDRSRRAMNPENYNSDGTFKRGVKLTRNKSKRYRRIQHQLAMIQHHQADIRKQQHNELANYLLTLGDCFFVENMSYCDLVHRANKTEISEKTGRYKRKKRFGKSIANKAPAMLITMLKQKCQSRGLEGVKEVDTHVRASQYNHQTDTCIEKALENRWNVMPDGERIQRDLYSAFLLQHCKQGLPEYNRKELKKEFGEELYRVFDREALQRDYPQFVAYHHMTIQRLSELPHTIASMGIRRSIS

SEQ ID NO: 1884 - protein, 538 aa, unidentified
  REGION 1..538: note = Description of Unknown: uncultivated organism sequence
  REGION 1..538: note = Category: MG81 effectors
  REGION 1..538: note = Description: MG81-162 effector
MDNEEKEKDGATCCLTLPLKLEKWQSDHLEKRFEIARQLYNTLVHAELKKKCQVERMPEYQEIMKMIDTASNQKEKWALEKKRKAFLEENGFSRNAFKADMEKYYKHFNDNIGANVALHGITAQVWIAFDKVFVDNYKQKGKVHFKKPGELCSVQGYSQKKSGGKEIMFREDRIIWNQQGNRDRKKVKREFLLKLSPNNPYEAEMLKRHVKFVRILRKDGKTKPHWYAQLVLEGKPAVKRDPISSAPKHPVGHGVVGIDIGTRTLAYSTDKEVNLLELADRVQNIEQEKRRLQRKMDRSRRAMNPENYNSDGTFKRGVKLTRNKSKRYRRIQHQLAMIQHHQADIRKQQHNELANYLLTLGDCFFVENMSYCDLVHRANKTEISEKTGWYKRKKRFGKSIANKAPAMLITMLKQKCQSRGLEGVKEVDTHVRASQYNHQTDTCIEKALENRWNVMPDGERIQRDLYSAFLLQHCKQGLPEYNRKELKKEFGEELYRVFDREALQRDYPQFVAYHHMTIQRLSELPHTIPSMGIRRIIS

SEQ ID NO: 1885 - protein, 536 aa, unidentified
  REGION 1..536: note = Description of Unknown: uncultivated organism sequence
  REGION 1..536: note = Category: MG81 effectors
  REGION 1..536: note = Description: MG81-163 effector
MDNEEKEKDGATCCLTLPLKLEKWQSDHLEKRFEIARQLYNTLVHAELKRIHRIERMPEYREIERLIEATTDKKEKWALKNQKKQFLRKNGINRNTFTTDMKRLYKHFNDNIGSNVAQHGIVSQVLTAFEKVYIENQSGEVHFKKPGDLRSVQGYSQKKSGGVEIMFREGKIIWNQQGNNDRKGVAREFPLKLSPDNSYEAEMLKKHVKFVRILRKDGKTKPHWYAQLVLEGTPVAKYDPISGAPKHPVGHGVVGIDIGTRTLAYSTDKEVNLLELADRVQNIEQEKRRLQRKMDRSRRAMNPENYNSDGTFKRGVKLTRNKSKRYRRIQHQLAMIQHHQADIRKQQHNELANYLLTLGDCFFVENMSYCDLVHRANKTEISEKTGRYKRKKRFGKSIANKAPAMLITMLKQKCQSRGLKGVKEVDTHVRASQYNHQTDTCIEKALENRWNVMPDGERIQRDLYSAFLLQHCKQGLPEYNRKELKKEFGEELYRVFDREALQRDYPQFVAYHHMTIQRLSELPHTIPSMGIRRIIS

SEQ ID NO: 1886 - protein, 550 aa, unidentified
  REGION 1..550: note = Description of Unknown: uncultivated organism sequence
  REGION 1..550: note = Category: MG81 effectors
  REGION 1..550: note = Description: MG81-164 effector
MGWKSKGRGGTLVDNEEKKEDGATCCLTLPLKLEKWQSDHLEKRFEIARQLYNTLVHAELKKKCQVERMPEYQEIMKMIDTASNQKEKWALEKKRKAFLEENGFSRNAFKADMEKYYKHFNDNIGANVALHGITAQVWIAFDKVFVDNYKQKGKVHFKKPGELCSVQGYSQKKSGGKEIMFREDRIIWNQQGNRDRKKVKREFLLKLSPNNPYEAEMLKRHVKFVRILRKDGKTKPHWYAQLVLEGKPAVKRDPISSAPKHPVGHGVVGIDIGTRTLAYSTDKEVNLLELADRVQNIEQEKRRLQRKMDRSRRAMNPENYNSDGTFKRGVKLTRNKSKRYRRIQHQLAMIQHHQADIRKQQHNELANYLLTLGDCFFVENMSYCDLAHRANKTEISEKTGRYKRKKRFGKSIANKAPAMLITMLKQKCQSRGLEGVKEVDTHVCASQYNHQTDTCIKKALENRWNIMPDGERIQRDLYSAFLLQHCRRDLPEYNRKELQKEFGEELYRVFDREALQRDYPQFVAYHHMTIQRLSELPHTIPSMGIRRIIS

SEQ ID NO: 1887 - protein, 534 aa, unidentified
  REGION 1..534: note = Description of Unknown: uncultivated organism sequence
  REGION 1..534: note = Category: MG81 effectors
  REGION 1..534: note = Description: MG81-165 effector
MVRKSKGRGGTLVKKSSTDTCCLTLPLKLEKWQSDRLEKRFEIGRQIYNTVVRAELKKLQQVERTPQYREIEQKLKEAKQEEAKELWKTRTQLLSKSGFSEYGFKSDMKYYYQHFKENIGSSVAVHGIASQVWTAFEKVLFSKDGKMVHFKKKGELSSLRGYSQAGKSGGIEIIFRGSYVEWKGLKLPLKLSPDNDYETEMLSKRVKYVRILRKEGKTKPHWYAQLVLEGKPAIKRDPASGAPKHPVGHGVVGIDIGTRTLAYSTDKEVNLLELADRVQNIEQEKRRLQRKMDRSRRAMNPENYNSDGTFKRGVKLTRNKSKRYRRIQHQLAMIQHHQADIRKQQHNELANYLLTLGDCFFVENMSYCDLVHRANKTEISEKTGRYKRKKRFGKSIANKAPAMLITMLKQKCQSRGLKGVKEVDTHVRASQYNHQTDTCIEKALENRWNVMLDGERIQRDLYSAFLLQHCKQGLPEYNRKELKKEFGEELYRVFDREALQRDYPQFVAYHHMTIQRLSELPHTIPSMGIRRIIS

SEQ ID NO: 1888 - protein, 512 aa, unidentified
  REGION 1..512: note = Description of Unknown: uncultivated organism sequence
  REGION 1..512: note = Category: MG81 effectors
  REGION 1..512: note = Description: MG81-166 effector
MPTKQKEDSNRCVLTLPLLTEPWQEHIIEKRFKIIEHLKNQLISIELRKLKKLQRTKAYKNLIKQIESVPKSERTALYKERNKMLKDAGFSQYTFMDDMAGKKSLMQKHFESHINVQIAHKAAIDVWSSFEKFLFGTGQIVHYQKRGTLSSVASKSPKTGMFYYSDENIFKWSGGGTKPKGGIILCLRVASVKTNYEKEMVANNEIKYYRVVRKWMKTKYKYYLQITFAGKPADKHREISTGRVGIDIGTQTIAIASDKSVKLLELADKVNKNHIKKCELQRKLDRSRRYTNPDNFNPDGTVKRGTKGHKLKWNKSKHYIDIAGKIRELERKNADIRKYQHTCLANDILAMGNQIYIEPMNYKGLQKRAKETQVDEKGRYKKKKRFGKSLANKAPAMFVTILKTKAEQHGGEVYEVDIMSYRASQCDHTTGEYTKHGLNDRWRILGNGDKVQRDLYSAFLIKNSNKTHDEIDLDKCSKTYDNFKKLHDKEIENIRNEVILRKRRNISSYGIA

SEQ ID NO: 1889 - protein, 427 aa, unidentified
  REGION 1..427: note = Description of Unknown: uncultivated organism sequence
  REGION 1..427: note = Category: MG81 effectors
  REGION 1..427: note = Description: MG81-167 effector
MKYYYQHFKENIGSSVAVHGIASQVWTAFEKVLFSKDGKMVHFKKKGELSSLRGYSQAGKSGGIEIIFRGSYVEWKGLKLPLKLSPDNDYETEMLSKRVKYVRILRKEGKTKPHWYAQLVLEGKPAIKRDPASGAPKHPVGHGVVGIDIGTRTLAYSADSKVDLIELADRVQNIEQEKMLLQRKLDRSRRATNPENYKPDGTIKKGVKLTRNKSKRYRKIQHQLAMLQHHQADIRKQQHNELANYLLTLGDCFFVENMSYCDLAHRANKTEISEKTGRYKRKKRFGKSIANKAPAMLITMLKQKCQSRGLEGVKEVDTHVCASQYNHQTDTCIKKALENRWNIMPDGERIQRDLYSAFLLQHCRRDLPEYNRKELQKEFGEELYRVFDREALQRDYPQFVAYHHMTIQRLSELPHTIPSMGIRRIIS

SEQ ID NO: 1890 - protein, 538 aa, unidentified
  REGION 1..538: note = Description of Unknown: uncultivated organism sequence
  REGION 1..538: note = Category: MG81 effectors
  REGION 1..538: note = Description: MG81-168 effector
MNNEEKEKEGATCCLTLPLKLEKWQSDHLEKRFEIARQLYNTLVHAELKKKCQVERMPEYQEIMKMIDTASNQKEKWALEKKRKAFLEENGFSRNAFKADMEKYYKHFNDNIGANVALHGITAQVWIAFDKVFVDNYKQKGKVHFKKPGELCSVQGYSQKKSGGKEIMFREDRIIWNQQGNRDRKKVKREFLLKLSPDNPYEAEMLKRHVKFVRILRKDGKTKPHWYAQLVLEGKPAVKRDPISSAPKHPVGHGVVGIDIGTRTLAYSTDKEVNLLELADHVQNIEQEKRRLQRKMDRSRRATNPENYNPDGTFKRGVKLTRNKSKRYRRIQHQLAMIQHHQADIRKQQHNELANYLLTLGDCFFVENMSYCDLVHRANKTEISEKTGRYKRKKRFGKSIANKAPAMLITMLKQKCQSRGLEGVKEVDTHVCASQYNHQTDTCIKKALENRWNIMPDGERIQRDLYSAFLLQHCRRDLPEYNRKELQKEFGEELYRVFDREALQRDYPQFVAYHHMTIQRLSELPHTIPSMGIRRIIS

SEQ ID NO: 1891 - protein, 529 aa, unidentified
  REGION 1..529: note = Description of Unknown: uncultivated organism sequence
  REGION 1..529: note = Category: MG81 effectors
  REGION 1..529: note = Description: MG81-169 effector
MILLANNNNNNTDTCVLTLPLRVEKWQEDCLLKRFEAARRIYNSLLNFELKKLRQLERTVEYRQIQSVISSAYRSNTKDSPECKDAFKRREKLISANGISEYGFKSDVKFFYKHFDGLIGSSVAVHCIAVQLWAAFDKYLSGSGKEIHFKRLGDISSLKGYSVKGKSGGREIIFRGQYVEWTRKKKKLLLPLKIDPDNEYEREMLSRRVKYVRIIKKPGKNRLRWYAQLTLEGKPALKYSAETGKPIHSVGKGDVGIDIGPQTVAYASDKEVALLELADRVTNIEHQKKKLQRKLDRSRRATNPDNYKPDGTIKRGVKLTRNKSKRYLKLQSKLAYIQHRQAEIRKLQHTCLANHMLTLGDRFFVEKMNWPGLAHRAKETSISEKTGRYKRKKRFGKSLANKAPAMFISILKRKCETLGLPGVVEVDTYNLKASQYNHLSDTYEKKSLSERWNYMPISDGSDSSKTKRIQRDLYSAFLLQHTIPQPCSFDKEALRIDYPNFVTMHDAEIHRLESLPKTVTSMGVRRSHS

SEQ ID NO: 1892 - protein, 534 aa, unidentified
  REGION 1..534: note = Description of Unknown: uncultivated organism sequence
  REGION 1..534: note = Category: MG81 effectors
  REGION 1..534: note = Description: MG81-170 effector
MGWKSKGRGRTRVKRSSTDTCCLTLPLKLEKWQSDRLEKRFEIGRQIYNTVVRAELKKLQQVERTPQYREIEQKLKGAKQEEAKELWKKRTQLLSQSGFSEYGFKSDMKYYYQHFKENIGSSVAVHGIASQVWTAFEKVLFSKDGKMVHFKKKGELSSLRGYSQAGKSGGVEIIFRGSYVEWKGLKLPLKLSPDNDYETEMLSKRVKYVRILRQDGKTKPHWYAQLVLEGKPAIKRDPASGAPKHPIGHGVVGIDIGTRTLAYSADSKVDLIELADRVQNIEQEKMLLQRKLDRSRRATNPGNYNPDGTIKCGVKLTRNKSKRYRKIQHQLAMIQHHQADIRKQQHNELANYLLTLGDCFFVENMSYCDLVHRANKTEISEKTGRYKRKKRFGKSIANKAPAMLITMLKQKCQSRGLKGVKEVDTHVRASQYNHQTDTCIEKALENRWNVMPDGERIQRDLYSAFLLQHCKQGLPEYNRKELKKEFGEELYRVFDREALQRDYPQFVAYHHMTIQRLSELPHTIPSMGIRRIIS

SEQ ID NO: 1893 - protein, 512 aa, unidentified
  REGION 1..512: note = Description of Unknown: uncultivated organism sequence
  REGION 1..512: note = Category: MG81 effectors
  REGION 1..512: note = Description: MG81-171 effector
MAKCSTDTCCLTLPLRLEKWQEDRLAKRFEIARQIYNTMVRAELKKLRAIEQSEPYKANQEKIQALDWKTQADKQALKALYKERDKLLRNGGFSEYGFKYDIKNYYMHFNNNIGSNVAVHGIAPQVWAAFEKMLFKKEGKKVHFKKKGDIRSLRGYSVTRKSGGVEIIFRETYIEWKGLKLPLKLSPDNIYETQMLSYRVKYVRLLRKPGKRKDRWYAQLSLEGKPVIKYNPKTGEVRHPIGKGAVGLDIGPQTLAYSAATGADLVELANQVQNVEQEKRRLQRKLDRSRRATNPGNYADDGTIRHGIALTHNKSKRYLRTQQELKYLQHQQAEIRKRQHTELANHLLSLGDCFYVEKMVWTSLTHRAKETEISEKTGKIKRKKRFGKSVANKPPATLIGILQLKSAALGIPGVIEVPTSVKASQYNHQSGTYTPKPLSQRWNNMPDGERIQRDLYSAFLLQHYDPQTNTFDANSLHQDYPQFVQYHHDAVLRLYAMPKTPSSMGIKRRSLR

SEQ ID NO: 1894 - protein, 534 aa, unidentified
  REGION 1..534: note = Description of Unknown: uncultivated organism sequence
  REGION 1..534: note = Category: MG81 effectors
  REGION 1..534: note = Description: MG81-172 effector
MGWKSKGRGGTLVKKSSTDTCCLTLPLKLEKWQSDRLEKRFEIGRQIYNTVVRAELKKLQQVERTPQYREIEQKLKEAKQEEAKELWKTRTQLLSKSGFSEYGFKSDMKYYYQHFKENIGSSVAVHGIASQVWTAFEKVLFSKDGKMVHFKKKGELSSLRGYSQAGKSGGIEIIFRGSYVEWKGLKLPLKLSPDNDYETEMLSKRVKYVRILRKEGKTKPHWYAQLVLEGKPAIKRDPASGAPKHPVGHGVVGIDIGTRTLAYSADSKVDLIELADRVQNIEQEKMLLQRKLDRSRRATNPENYKPDGTIKKGVKLTRNKSKRYRKIQHQLAMLQHRQADIRKRQHNELANYLLTLGDCFFVEDMDYRALTRKAKKTEISEKTGRYKRKKRFGKSIANKAPSMLIALLDQKCKSLNLEGVKKVDTAVKASQYNHQTDECKAKELKERWNIMPDGERIQRDLYSAFLLQHCRRDLPEYNRKKLQETFGNELYRVFDREALQRDYPKFVEYHRETIQRLSALPKTIASMGIRRIIS

SEQ ID NO: 1895 - protein, 522 aa, unidentified
  REGION 1..522: note = Description of Unknown: uncultivated organism sequence
  REGION 1..522: note = Category: MG81 effectors
  REGION 1..522: note = Description: MG81-173 effector
MKRSSTDTCCLTLPLKLEKWQSDRLEKRFEIGRQIYNTIVHAELKKLRKLERTQQYQEIEQKLENAKQEETKELWKKKRQLLDQNGLSENHFKADMKYYYPHFKDNIASSVAVHGIASQAWTAFEKVLLSKDGKMVHFKKKGELSSLRGYSQAGKSGGIEIIFRGSYVEWKGLKLPLQLSPNNEYETEMLSKRVKYVRILRKDGKTKTHWYAQLVLEGKPAIKRDPASGTPKHPVGHGVVGIDIGTRTLAYSTDKEVNLLELADHVQNIEQEKRRLQRKMDRSRRATNPENYNPDGTFKRGVKLTRNKSKRYRRIQHQLAMIQHHQADIRKQQHNELANYLLTLGDCFFVENMSYCDLVHRANKTEISEKTGRYKRKKRFGKSIANKAPAMLITMLKQKCQSRGLEGVKEVDTHVRASQYNHQTDTCIEKALENRWNVMPDGERIQRDLYSAFLLQHCKQGLPEYDRKELKKEFGEELYRVFDREALQRDYPQFVAYHHMTIQRLSELPHTIPSMGIRRIIS

SEQ ID NO: 1896 - protein, 522 aa, unidentified
  REGION 1..522: note = Description of Unknown: uncultivated organism sequence
  REGION 1..522: note = Category: MG81 effectors
  REGION 1..522: note = Description: MG81-174 effector
MKRSSTDTCCLTLPLKLEKWQSDRLEKRFEIGRQIYNTIVHAELKKLRKLERTQQYQEIEQKLENAKQEETKELWKKKRQLLDQNGLSENHFKADMKYYYPHFKDNIASSVAVHGIASQAWTAFEKVLLSKDGKMVHFKKKGELSSLRGYSQAGKSGGIEIIFRGSYVEWKGLKLPLQLSPNNEYETEMLSKRVKYVRILRKDGKTKAHWYAQLALEGKPAVKRDSISGAPKHPVGHGVVGIDIGTRTLAYSTDSEVNLLELADRVQNIEQEKRRLQRKMDRSRRAMNPGNYKPDGSIKQGVKLTWNNSKRYKRIQHQYAMIQHHQADIRKQQHNELANYLLTLGDCFFVENMSYCDLAHRANKTEISEKTGRYKRKKRFGKSIANKAPAMLITMLKQKCQSRGLEGVKEVDTHVCASQYNHQTDTCIKKALENRWNIMPDGERIQRDLYSAFLLQHCRRDLPEYNRKELQKEFGEELYRVFDREALQRDYPQFVAYHHMTIQRLSELPHTIPSMGIRRIIS

SEQ ID NO: 1897 - protein, 534 aa, unidentified
  REGION 1..534: note = Description of Unknown: uncultivated organism sequence
  REGION 1..534: note = Category: MG81 effectors
  REGION 1..534: note = Description: MG81-175 effector
MGWKSKGRGGTRVKKSSTDTCCLTLPLKLEKWQSDRLEKRFEIGRQIYNTVVRAELKKLQQVERTPQYREIEQKLKGAKQEEAKELWKKRTQLLSKSGFSEYGFKSDMKYYYQHFKENIGSSVAVHGIASQVWTAFEKVLFSKDGKMVHFKKKGELSSLRGYSQAGKSGGVEIIFRGSYVEWKGLKLPLKLSPDNDYETEMLSKRVKYVRILRKEGKTKPHWYAQLVLEGKPAIKRDPASGTPKHPVGHGVVGIDIGTRTLAYSTDSEVNLLELADRVQNIEQEKRRLQRKMDRSRRAMNPENYNPDGTFKRGVKLTRNKSKRYRRIQHQLAMIQHHQADIRKQQHNELANYLLTLGDCFFVENMSYCDLVHRANKTEISEKTGRYKRKKRFGKSIANKAPAMLITMLKQKCQSRGLKGVKEVDTHVRASQYNHQTDTCIEKALENRWNVMPDGERIQRDLYSAFLLQHCKQGLPEYDRKELKKEFGEELYRVFDREALQRDYPQFVAYHHMTIQRLSELPHTIPSMGIRRIIS

SEQ ID NO: 1898 - protein, 511 aa, unidentified
  REGION 1..511: note = Description of Unknown: uncultivated organism sequence
  REGION 1..511: note = Category: MG81 effectors
  REGION 1..511: note = Description: MG81-176 effector
MGKSKTETCCLTLPLKLEKWQEDRLAKRFEIARQIYNTLVHAELKKLNQIERSSEYQTIQDQITNLDRNDPERIKELPSLYKKRTKLLRDAGFTEYGFKSDVKYYYKYFHKNIGSSVAVHGIAPQVWAAFEKKLFKKQGKIVHYKRKGTLRSVKGGSATGKSGGTEIIFRGTYIQWKDLNLPLKQSPDNAYESEMLGYRVKYVRILRKPGKSKDRWYAQLVLEGKPVIKRNPMTGAALHPVGHGAVGLDIGPQTLAYSAADGVGLLELADQVQNIERQKALLQRKLDRSRRASNPDNYNEDGTIKRGVKLTRNQSKRYCKTQRDLAYLQHCQAETRKRQHIALANHLLTLGDRFYVEQMSWAALARRSKKTEVSEKTGKIKRKKRFGKSIANKAPAMLIEILRQKCISLGLPGVVDVPTSIKASQYNHQSKDYIKKNLSERWNDMPDGEKIQRDLYSAFLLQHCTPELNAFDQESLQQDYPQFVQYHHQVMQQLSEMPKTPSSMGIRRRTS

SEQ ID NO: 1899 - protein, 515 aa, unidentified
  REGION 1..515: note = Description of Unknown: uncultivated organism sequence
  REGION 1..515: note = Category: MG81 effectors
  REGION 1..515: note = Description: MG81-177 effector
MAEETGRCVLTLPLLTEPWQEHIMEKRFSIVEHLKNQLIAMELRKLKNLQRTKAYRELAEKIEATPKEKRAPLYRERKKMLQDAGFSEYAFKHDMQSPENPMQQHFSMHITSKVAERAASDVWRAFQKYLYSNGNEVHFHKRGTLKSVACQANGSGMYYQDDTFAWHRGKTAKVKPAKDNPQGRKKRDKNKQLHIKVRPPQNAYEREMLKKEVKEIRVVRQWVKSRYKYYLQLTLVGPPVPKERKLGVGRVGIDIGTQTIAISSETSVQLRELAPGVNDNHEKKLRLQRQMDRSKRATNPENYNPDGTIRRPPKGERMRWNFSKRYKKLAGKVRELERKNAAIRKYEHTCLANEILSLGDEIYVEKMSFSGLQRRAKETKKDAKGCYLKKKRFGKSLANKAPATLMQILKTKAALTGQVAEEVNTTAFRASQFDHTSGQYRKPLLSERWKTLSGGERVQRDMYSAFLLMNSDSDKTQSDAELCSLTFENFRRLHDAEVTRIRNEHKRHLRSFGID

SEQ ID NO: 1900 - protein, 478 aa, unidentified
  REGION 1..478: note = Description of Unknown: uncultivated organism sequence
  REGION 1..478: note = Category: MG81 effectors
  REGION 1..478: note = Description: MG81-178 effector
MGWKSKGRGGTLVKKSSTDTCCLTLPLKLEKWQSDRLEKRFEIGRQIYNTVVRAELKKLQQVERTPQYREIEQKLKEAKQEEAKELWKTRTQLLSKSGFSEYGFKSDMKYYYQHFKENIGSSVAVHGIASQVWTAFEKVLFSKDGKMVHFKKKGELSSLRGYSQAGKSGGIEIIFRGSYVEWKGLKLPLKLSPDNDYETEMLSKRVKYVRILRKEGKTKPHWYAQLVLEGKPAIKRDPASGAPKHPVGHGVVGIDIGTRTLAYSADSKVDLIELADRVQNIEQEKMLLQRKLDRSRRATNPENYKPDGTIKKGVKLTRNKSKRYRKIQHQLAMLQHRQADIRKRQHNELANYLLTLGDCFFVEDMDYRALTRKAKKTEISEKTGRYKRKKRFGKSIANKAPSMLIALLDQKCKSLNLEGVKKVDTAVKASQYNHQTDECKAKELKERWNIMPDGERIQRDLYSAFLLQHCRRDLPEYN

SEQ ID NO: 1901 - protein, 438 aa, unidentified
  REGION 1..438: note = Description of Unknown: uncultivated organism sequence
  REGION 1..438: note = Category: MG81 effectors
  REGION 1..438: note = Description: MG81-179 effector
MEKYYKHFNDNIGANVALHGITAQVWIAFDKVFVDNYKQKGKVHFKKPGELCSVQGYSQKKSGGKEIMFREDRIIWNQQGNRDRKKVKREFLLKLSPDNPYEAEMLKRHVKFVRILRKDGKTKPHWYAQLVLEGKPAVKRDPASGAPKHPVGHGVVGIDIGTRTLAYSTDKEVNLLELADRVQNIEQEKRRLQRKMDRSRRATNPENYNPDGTFKRGVKLTRNKSKRYRRIQHQLAMIQHHQADIRKQQHNELANYLLTLGDCFFVENMSYCDLVHRANKTEISEKTGRYKRKKRFGKSIANKAPAMLITMLKQKCQSRGLEGVKEVDTHVRASQYNHQTDICIEKALENRWNVMPDGERIQRDLYSAFLLQHCKQGLPEYNRKELKKEFGEELYRVFDREALQRDYPQFVAYHHMTIQRLSELPHTIPSMGIRRIIS

SEQ ID NO: 1902 - protein, 511 aa, unidentified
  REGION 1..511: note = Description of Unknown: uncultivated organism sequence
  REGION 1..511: note = Category: MG81 effectors
  REGION 1..511: note = Description: MG81-180 effector
MKKSNTDTCCLTLPLKLEKWQEDRLAKRFEIARQIYNTMVHAELKKLRNIENSQPYRQIQKQIEALNWKNQNDKARLKSLYNDRNKLLNTIGFSEYGFKADIKYYYKHFNDNIGSSVAVHGIAPQVWAAFEKMLFHKEGKKVHYKKKDDIHSLHGYSVTGKSGGVEIIFRKTYIEWKGLKLPLKRSPDNAYETEMLDRRVKYVRLLRKPGKRKDCWYAQLSLEGKPAIKRDPKSGKRRHSIGRGAVGLDIGPQTLAYSACGAADLVELADQVQNIEQMKRRLQRKLDRSRRATNPDNYADNGTIRRGVKLTHNKSNRYRRTQRELRYLQHCQAEIRKRQHIELANHLLALGDCFYVEDMAWPSLTHRAKETAISEKTGRIKRKKRFGKSVANKAPATLIGILEQKCNSLGLPGVVKVPTSLRASQYNHQSGEYTSKPLSQRWNNMPDGERIQRDLYSAFLLQHYDPKAGNFDSVLLQQDYPQFVQYHHRAIQRLSTVPKTLSSMGIQRSLR

SEQ ID NO: 1903 - protein, 511 aa, unidentified
  REGION 1..511: note = Description of Unknown: uncultivated organism sequence
  REGION 1..511: note = Category: MG81 effectors
  REGION 1..511: note = Description: MG81-181 effector
MAKCSTDTCCLTLPLRLEKWQEDRLAKRFEIARQIYNTMVRAELKKLRAMEQSEPYKANQEKIQALDWKTQADKQALKALYKERDKLLRDGGFSEYGFKSDIKNYYKHFNNNIGSSVAVHGIAPQVWAAFEKMLFKKEGKKVHFKKKGDIHSLRGYSVTGKSGGVEIIFRETYIEWKGLKLPLKLSPDNIYETQMLSYRVKYVRLLRKPGKRKDRWYAQLSLEGKPVIKYNPKTGEVRHPIGKGAVGLDIGPQTLAYSAATGADLVELANQVQNVEQEKRRLQRKLDRSRRATNPGNYADDGTIRRGIALTHNKSKRYLRTQQELKYLQHQQAEIRKRQHTELANHLLSLGDCFYVEKMVWTSLTHRAKETEISEKTGKIKRKKRFGKSVANKAPATLIGILQRKSAALGIPGVIEVPTSVKASQYNHQSGTYTPKPLSQRWNNMPDGERIQRDLYSAFLLQHYDPQTNTFDANSLHQDYPQFVQYHHDAVLRLYAMPKTPSSMGIKRSLR

SEQ ID NO: 1904 - protein, 511 aa, unidentified
  REGION 1..511: note = Description of Unknown: uncultivated organism sequence
  REGION 1..511: note = Category: MG81 effectors
  REGION 1..511: note = Description: MG81-182 effector
MAKCSTDTCCLTLPLRLEKWQEDRLAKRFEIARQIYNTMVRAELKKLRAMEQSEPYKANQEKIQALDWKTQTDKQALKALYKERDKLLRDGGFSEYGFKSDIKNYYKHFNNNIGSNVAFHGIAPQVWAAFEKMLFKKEGQKVHFKKKGDIHSLRGYSAAGKSGGVEIIFRETYIEWKGLKLPLKLSPDNIYETQMLSYRVKYVRLLRKPGKRKDRWYAQLSLEGKPVIKYNPKTGEVRHPIGKGAVGLDIGPQTLAYSAATGADLVELANQVQNVEQEKRRLQRKLDRSRRATNPGNYADDGTIRRGIALTHNKSKRYLRTQQELKYLQHQQAEIRKRQHTELANHLLSLGDCFYVEKMVWTSLTHRAKETEISEKTGKIKRKKRFGKSVANKAPATLIGILQRKSAALGIPGVIEVPTSVKASQYNHQSGTYTPKPLSQRWNNMPDGERIQRDLYSAFLLQHYDPQTNTFDANSLHQDYPQFVQYHHDAVLRLYAMPKTPSSMGIKRSLR

SEQ ID NO: 1905 - protein, 512 aa, unidentified
  REGION 1..512: note = Description of Unknown: uncultivated organism sequence
  REGION 1..512: note = Category: MG81 effectors
  REGION 1..512: note = Description: MG81-183 effector
MEKTKGSDDTCCLTLPLKLEKWQEDRLARRLELARQIYNTLMHAELKKLRNVQQSPEYRRMQAEMRALDWKKEADKPPLRKLYKERDKLLKKAGFTKFGFKNDMKYYYKHFNQNIGSSVAVHGIASQVWTAFDKMLFQKDGKKVHFKKYGDLHSVQGYSAAKSGGVEIMFRGTCIEWKGLELPLKRKPDNAYETEMLQKHIKFVRILRKPGKNRDRWYAQLTLAGKPAVKRDAVSGRQIHPLGHGPVGLDIGPQTLAYAAETEADLVELADLVQDIELEKRRIQRKMDRSRRAANPDNYAEDGTIKRGVKLTHNKSRRYLRLQKKLSHLQHCQAETRKRQHNELANHLLTLGDCFYIEKMNWTSLTHRAKKTEISEKTGKIKRKKRFGKSIANKAPGMLIEILKRKCLSRGLPKVAELPTTLKASQYNHLTKEYTKKSLSQRWNTMPDGKRIQRDLYSAFLLQHYNPQLQNFDQEALEKEYPQFVLLHDQAIERLSAIPKMPSSMGIRRSVS

SEQ ID NO: 1906 - protein, 307 aa, unidentified
  REGION 1..307: note = Description of Unknown: uncultivated organism sequence
  REGION 1..307: note = Category: MG81 effectors
  REGION 1..307: note = Description: MG81-184 effector
MAKCSTDTCCLTLPLRLEKWQEDRLAKRFEIARQIYNTMVRAELKKLRAMEQSEPYKANQEKIQALDWKTQADKQALKALYKERDKLLRNGGFSEYGFKSDIKNYYKHFNNNIGSNVAFHGIAPQVWAAFEKMLFKKEGKKVHFKKKGDIHSLRGYSAAGKSGGVEIIFRETYIEWKGLKLPLKLSPDNIYETQMLSYRVKYVRLLRKPGKRKDRWYAQLSLEGKPVIKYNPKTGEVRHPIGKGAVGLDIGPQTLAYSAATGADLVELANQVQNVEQEKRRLQRKLDRSRRAPTQVITRMMEPFDAE

SEQ ID NO: 1907 - protein, 528 aa, unidentified
  REGION 1..528: note = Description of Unknown: uncultivated organism sequence
  REGION 1..528: note = Category: MG81 effectors
  REGION 1..528: note = Description: MG81-185 effector
MAKNNNNNNNTDTCVLTLPLRVEKWQEDCLLKRFEAARRIYNSLLNFELKKLRQLERTVEYRQIQSVISSAYRSNTKDSPECKDAFKRRKKLTDENGISENGFKSDVKFFYKHFDGLIGSSVAVHCIAVQLWAAFDKYLSGSGKEIHFKRLGDISSLKGYSVKGKSGGLEIIFRGQYVEWTRKKKKLLLPLKIDPDNEYEREMLSRRVKYVRIIKKPGKNRLRWYAQLTLEGKPALKYSAETGKPIHSVGKGDVGIDIGPQTVAYASDKEVALLELADRVTNIEHQKKKLQRKLDRSRRATNPDNYKPDGTIKRGVKLTRNKSKRYLKLQSKLAYIQHRQAEIRKLQHTCLANHMLTLGDRFFVEKMNWPGLAHRAKETSFSEKTGRYKRKKRFGKSLANKAPAMFISILKRKCETLGLPGVVEVDTYNLKASQYNHLSDTYEKKSLSERWNYMPISDGSDSSKTKRIQRDLYSAFLLQHTIPQPCSFDKEALRIDYPNFVTMHDAEIHRLESLPKTVTSMGVRRSHS

SEQ ID NO: 1908 - protein, 427 aa, unidentified
  REGION 1..427: note = Description of Unknown: uncultivated organism sequence
  REGION 1..427: note = Category: MG81 effectors
  REGION 1..427: note = Description: MG81-186 effector
MKYYYQHFKENIGSSVAVHGIASQVWTAFEKVLFSKDGKMVHFKKKGELSSLRGYSQAGKSGGVEIIFRGSYVEWKGLKLPLKLSPDNDYETEMLSKRVKYVRILRQDGKTKPHWYAQLVLEGKPAIKRDPASGAPKHPVGHGAVGIDIGTRTLAYSADSKVDLIELADRVQNIEQEKLLLQRKLDRSRRATNPENYKPDGTIKKGVKLTRNKSKRYRKIQHQLAMLQHRQANIRKRQHNELANYLLTLGDCFFVEDMDYRALTRKAKKTEISEKTGRYKRKKRFGKSIANKAPSMLIALLDQKCKSLNLEGVKKVDTAVKASQYNHQTDECKAKELKERWNIMPDGERIQRDLYSAFLLQHCRRDLPEYNRKKLQETFGNEVYRVFDREALQRDYPKFVEYHRETIQRLSALPKTIASMGIRRIIS

SEQ ID NO: 1909 - protein, 480 aa, unidentified
  REGION 1..480: note = Description of Unknown: uncultivated organism sequence
  REGION 1..480: note = Category: MG81 effectors
  REGION 1..480: note = Description: MG81-187 effector
MPEYREIERLIEATTDKKEKWALKNQKKQFLRKNGINRNTFTTDMKRLYKHFNDNIGSNVAQHGIVSQVLTAFEKVYIENQSGEVHFKKPGDLRSVQGYSQKKSGGVEIMFREGKIIWNQQGNNDRKGVAREFPLKLSPDNSYEAEMLKKHVKFVRILRKEGKTKSHWYAQLVLEGKPTVKRDPISGAPKHPVGHGVVGIDIGTRTLAYSTDSEVNLLELADRVQNIEQEKRRLQRKMDRSRRAMNPENYNSDGTFKRGVKLTRNKSKRYRRIQHQLAMIQHHQEDIRKQQHNELANYLLTLGDCFFVENMSYCDLVHRANKTEISEKTGRYKRKKRFGKSIANKAPAMLITMLKQKCQSRGLEGVKEVDTHVRASQYNHQTDTCIEKALENRWNVMPDGERIQRDLYSAFLLQHCKQGLPEYDRKELKKEFGEELYRVFDREALQRDYPQFVAYHHMTIQRLSELPHTIPSMGIRRIIS

SEQ ID NO: 1910 - protein, 511 aa, unidentified
  REGION 1..511: note = Description of Unknown: uncultivated organism sequence
  REGION 1..511: note = Category: MG81 effectors
  REGION 1..511: note = Description: MG81-188 effector
MAKCSTDTCCLTLPLRLEKWQEDRLAKRFEIARQIYNTMVRAELKKLRAMEQSEPYKANQEKIQALDWKTQTDKQALKALYKERDKLLQDGGFSEYGFKSDIKNYYKHFNNNIGSNVAFHGIAPQVWAAFEKMLFKKEGKKVHFKKKGDIHSLRGYSAAGKSGGVEIIFRETYIEWKGLKLPLKLSPDNIYETQMLSYRVKYVRLLRKPGKCKDRWYAQLSLEGKPVIKYNPKTREVRHPIGKGAVGLDIGPQTLAYSAATGADLVELANQVQNVEQEKRRLQRKLDRSRRATNPGNYADDGTIRRGIALTHNKSKRYLRTQQELKYLQHQQAEIRKRQHTELANHLLSLGDCFYVEKMVWTSLTHRAKETEISEKTGKIKRKKRFGKSVANKAPATLIGILQRKSAALGIPGVIEVPTSVKASQYNHQSGTYTPKPLSQRWNNMPDGERIQRDLYSAFLLQHYDPQTNTFDANSLHQDYPQFVQYHHDAVLRLYAMPKTPSSMGIKRSLR

SEQ ID NO: 1911 - protein, 1387 aa, unidentified
  REGION 1..1387: note = Description of Unknown: uncultivated organism sequence
  REGION 1..1387: note = Category: MG81 effectors
  REGION 1..1387: note = Description: MG81-189 effector
MKLTKVEKARIAVSREKKDSGRIILYTNPEDVKKTSVTTMEQQVSKRIDQANKLYQVFFKSVIPVELNKHFAEISKIAAKCRNTEEFYKKACGYSGYEWTDAKQKKRTSQISRFSYTSSGKNMYVVMDNFVKEYMVQIWQEKDFRNAAVKILCCICDGKKFASKLEKVKKESPDTLKKFIEISGKCEGNPFVDYDTSFLEKVFTLVISQMVKNCDRKSYEQDDKEKIKKSIQKEIQWLSHVQSVTERSFGREGKTYLLFKIRNPYATEERLQTVLIRMRKTLKRGRNRDIAIVLLQGLAQMNQVTFTDTVKHLYQEEEKAFCDFIDAVNRDYYRVNIVKSVRNMDVKVQPDLNDNSILKLSGLGNIKKEALSDTLLRYAASADESDQVLLDIKKLLFEYFLPENSKETSKYTTVQNLWNIPYLPKIFFDYGFENEDFDDDNECAEDIETLCDVEPQYKINQHSLKRRIRYVNYGKYLQMTKNESDRERRYWIHYIKEFVEKNYVDSGRTLSEKNCYASSMMLNCWKEIIRYLCGKYIDIGKAVFHFTNLTAMPKPKDKIIYGQLEEQYKKGISSFDYEAIKAEETLQRDIVQSVVAAAFAFSKSVIDETKMEECQETNKEDILFLSENVLGSLLKENTIKLILRFYGGESTVAQKEYFDQQEIVQEMISHLKSIRNENFHYLDGAKKDNPHKYASILWKNDEMAYQKLTKQRYYANNVGLFYRAEEIQELVQELYSQKNITEAQIPAFRTVLKRKDLPGYMEELGILFPDNTQEKSKGDFEGTLYFLMKEIYYRDFIVKDKAAAYFFKAVDQNKEQSKKEDKHTERAAENFHRYVKSLEKKYNKKEISFRTVCQYIMMEYNQQNTTKQETEIYKHFKMLISLCIRKAFGNYIKETYRFLFHPIYSKQQGEPEYLDTLELESGVKEKNYEWFTLAHFLHPVQLNHLVGDLKSYIQYREDILRRIVFAEQRVYADQQKEVQQKVKTAKEILEVLEFVREVSGRVSNEYTDYYENEEEYAEFLYQYIDFRRREGKSAFESLKYFCQNILDSGTVVDLYADTENPKVLRNIELTRMYAGSNVKIPEYEKITEDEIKMYYQEKNSVALILSRGLCRNEKEQKKVIEFNWKKKRLTLNEITDVFSLVNDLLGKMISFSYLRERDQMYLLLGFYYMALCAENKSENHLGWKGETLDKLESSDSKFDIGGGLVLYQIVSAFNFGSKLLYISEDGRWKMAGGAFPGKYGRFENDYNHRTSLSKVIRLFENESYEREIIYWRDYVDHMKYYVNQNQSIMEIYSAFYSKVLGYSAKLRKSVVFNLQAALEKHHINPECIWMTSDGKCADIKLMKNLESQKFTYKLAKREGEKTERKICMNALNENFLKTIRTSLEYKK

SEQ ID NO: 1912 - protein, 511 aa, unidentified
  REGION 1..511: note = Description of Unknown: uncultivated organism sequence
  REGION 1..511: note = Category: MG81 effectors
  REGION 1..511: note = Description: MG81-190 effector
MAKCSTDTCCLTLPLRLEKWQEDRLAKRFEIARQIYNTMVRAELKKLRAMEQSEPYKANQEKIQALDWKTQTDKQALKALYKERDKLLRDGGFSEYGFKSDIKNYYKHFNNNIGSNVAFHGIAPQVWAAFEKMLFKKEGKKVHFKKKGDIHSLRGYSAAGKSGGVEIIFRETYIEWKGLKLPLKLSPDNIYETQMLSYRVKYVRLLRKPGKRKDRWYAQLSLEGKPVIKYNPKTGEVRHPIGKGAVGLDIGPQTLAYSAATGADLVELANQVQNVEQEKRRLQRKLDRSRRATNPGNYADDGTIRRGIALTHNKSKRYLRTQQELKYLQHQQAEIRKRQHTELANHLLSLGDCFYVEKMVWTSLTHRAKETEISEKTGKIKRKKRFGKSVANKAPATLIGILQRKSAALGIPGVIEVPTSVKASQYNHQSGTYTPKPLSQRWNNMPDGERIQRDLYSAFLLQHYDPQTNTFDANSLHQDYPQFVQYHHDAVLRLYAMPKTPSSMGIKRSLH

SEQ ID NO: 1913 - protein, 512 aa, unidentified
  REGION 1..512: note = Description of Unknown: uncultivated organism sequence
  REGION 1..512: note = Category: MG81 effectors
  REGION 1..512: note = Description: MG81-191 effector
MKKSSTDTCCLTLPLKLEKWQEDRLAKRFEIARQLYNTLVHAELKRLVQIKRTAEYLENEQKIRALDRNNPADRAKLQELYKEQRKSLKTAGFTDYSFTTDMGKYYKHFRDNIGSSVAVHGIAPQVWAAFDKVLFKKGGKKVHYKRPGEVNSVQGYSRTGKSGGREIMFRGAYIEWKGLKLPLKLSPDNAYETDMLQRRVKLVRLVRRPGKRRDRWYAQLVLEGKPAIKADPVTGKAVHPIGSGPIGLDIGPQTLAYSAAGVAGLVELADRVQNIEQEKRRLQRKMDRSRRATNPDNYAEDGTIRRGVKLTHNKSKRYRRNQQELKYLQHRQAEIRKLQHIQFANHLLSLGDHFYVEKMEWSSLTHRAKETVISEKTGKPRSKRRFGKSIANKAPAMLIEILRQKCKSLGLSDVVEINPADIKAIQYNHLTGKYVKKSLSRRWNDMQDGEHLQRDLYSAFLLQHYDSCSKTLDHDSIVRDYPAFVQYHHREIERLHALPKTPSSMGIRRSIA

SEQ ID NO: 1914 - protein, 511 aa, unidentified
  REGION 1..511: note = Description of Unknown: uncultivated organism sequence
  REGION 1..511: note = Category: MG81 effectors
  REGION 1..511: note = Description: MG81-192 effector
MAKCSTDTCCLTLPLRLEKWQEDRLAKRFEIARQIYNTMVRAELKKLRAMEQSEPYKANQEKIQALDWKTQTDKQALKALYKERDKLLQDGGFSEYGFKSDIKNYYKHFNNNIGSSVAVHGIAPQVWAAFEKMLFKKEGKKVHFKKKGDIRSLRGYSVTGKSGGVEIIFRETYIEWKGLKLPLKLSPDNIYETQMLSYRVKYVRLLRKPGKRKDRWYAQLSLEGKPVIKYNPKTGEVRHPIGKGAVGLDIGPQTLAYSAATGADLVELANQVQNVEQEKRRLQRKLDRSRRATNPGNYADDGTIRRGIALTHNKSKRYLRTQQELKYLQHQQAEIRKRQHTELANHLLSLGDCFYVEKMVWTSLTHRAKETEISEKTGKIKRKKRFGKSVANKAPATLIGILQRKSAALGIPGVIEVPTSVKASQYNHQSGTYTPKPLSQRWNNMPDGERIQRDLYSAFLLQHYDPQTNTFDANSLHQDYPQFVQYHHDAVLRLYAMPKTPSSMGIKRSLR

SEQ ID NO: 1915 - protein, 526 aa, unidentified
  REGION 1..526: note = Description of Unknown: uncultivated organism sequence
  REGION 1..526: note = Category: MG81 effectors
  REGION 1..526: note = Description: MG81-193 effector
MAKKNNNDTDTCVLTLPLRVEKWQEDCLLKRFEAARRIYNSLLNFELKKLRQLERTVEYRQIQSVISSAYRSNTKDSPECKDAFKRREKLISANGISEYGFKSDVKFFYKHFDSLIGSSVAVHCIAVQLWAAFDKYLSGSGKEIHFKRLGDISSLKGYSVKGKSGGCEIIFRGQYVEWTRKKKKLLLPLKIDPDNEYEREMLSRRVKYVRIIKKPGKNRLRWYAQLTLEGKPALKYSAETGKPIHSVGNGNVGIDIGPQTIAYASDKEVALLELADRVTNIEHQKKKLQRKLDRSRRATNPDNYKPDGTIKRGVKLTRNKSKRYLKLQSKLAYIQHRQAEIRKLQHTCLANHMLTLGDRFFVEKMNWSGLAHRAKETSISEKTGRYKRKKRFGKSLANKAPAMFISILKRKCETLGLPGVVEVDTYSLKASQYNHLSDTYEKKSLSERWNYMPISDGSDSSKTKRIQRDLYSAFLLQHTIPQPCSFDKEALRIDYPNFVIMHDAEIHRLESLPKTVTSMGVRRSHS

SEQ ID NO: 1916 - protein, 511 aa, unidentified
  REGION 1..511: note = Description of Unknown: uncultivated organism sequence
  REGION 1..511: note = Category: MG81 effectors
  REGION 1..511: note = Description: MG81-194 effector
MAKCSTDTCCLTLPLRLEKWQEDRLAKRFEIARQIYNTMVRAELKKLRAMEQSEPYKANQEKIQALDWKTQADKQALKALYKERDKLLQDGGFSERGFKSDIKNYYKHFNNNIGSNVAFHGIAPQVWAAFEKMLFKKEGKKVHFKKKGDIHSLRGYSAAGKSGGVEIIFRETYIEWKGLKLPLKLSPDNIYETQMLSYRVKYVRLLRKPGKRKDRWYAQLSLEGKPVIKYNPKTGEVRHPIGKGAVGLDIGPQTLAYSAATGADLVELANQVQNVEQEKRRLQRKLDRSRRATNPGNYADDGTIRRGIALTHNKSKRYLRTQQELKYLQHQQAEIRKRQHTELANHLLSLGDCFYVEKMVWTSLTHRAKETEISEKTGKIKRKKRFGKSVANKAPATLIGILQRKSAALGIPGVIEVPTSVKASQYNHQSGTYTPKPLSQRWNNMPDGERIQRDLYSAFLLQHYDPQTNTFDANSLHQDYPQFVQYHHDAVLRLYAMPKTPSSMGIKRSLR

SEQ ID NO: 1917 - protein, 535 aa, unidentified
  REGION 1..535: note = Description of Unknown: uncultivated organism sequence
  REGION 1..535: note = Category: MG81 effectors
  REGION 1..535: note = Description: MG81-195 effector
MGEMENIGNFVVTFEINVDKSQTDIIDKKLEVLRRMYNSIVGTFNSRHKEMIKTKRWRVMTSELFQSEKRTELHAQRKEFEKDSDDYNRITEEINLLKGKLSSERKKELTDTQKEILKENEFSEWGIYGTKGSGVGWKQYNHYKKCGIYSNNTMKLCSNIWRAYEKLLFGKGKRVSFKKYGELNTIQGANNKSAIVIRFDDNKKPYVVFDKLNIKIHFNPKKPYEFDAMYNRDIVCSTILRKQIRGKQKYYIQITFKGRPFSKENQQIGIGNVGIDIGTQTIAVTSDNSVMLKELANRTPKYEKEIRVLLRAMDRSRRSTNPQNYNDDGTIKRGIKLQWNVSKNYVKLKLKHKELARKKSEITTLQHNELSNEIISQGDVFKVEKMSFTSLTKRTKKTEVSEITGKFKRKKRFGKSIGNKAPSKLLSILKNKVIAKGGKFIEVNTQKCRASQYNHISDDYTKKSLSQRWNNFTIDENKIKIQRDIYSSFLIKNVNEDNETFNKEKIIEEFSNFIKLHNNEIEILKNTKNISSIGI

SEQ ID NO: 1918 - protein, 512 aa, unidentified
  REGION 1..512: note = Description of Unknown: uncultivated organism sequence
  REGION 1..512: note = Category: MG81 effectors
  REGION 1..512: note = Description: MG81-196 effector
MKKSNTDTCCLTLPLKLGKWQEDRLAKRFEIARQLYNTLVHAELKRLAQVKQTAEYRENERKIRTLDWNDPGDQAKLKGLYKERRKSLKTAGFTDYSFTTDMGKYYKHFRDNIGSNVALHGIAPQVWAAFDKLLFKKGGKKVHYKKPGEVNSVQGYSRTGKSGGTEIMFREPYIEWKGLKLPLKLSPDNAYETDMLQRRVKLVRLVRRPGKRRDRWYAQLVLEGKPAIKADPVTGKAVHPIGSGPVGLDIGPQTLAYSAAGVAGLVELADRVQNIEQEKRRLQRKMDRSRRATNPDNYAEDGTIRRGVKLTHNKSKRYRRNQQELKYLQHRQAEIRKLQHIQLANHLLSLGDHFYVEKMEWSSLTHRAKETVISEKTGKPRSKRRFGKSIANKAPAMLIEILRQKCKSLGLSDVVEINPADIKASQYNHLTGKYVKKSLSRRWNDMQDGEHLQRDLYSAFLLQHYDSCSKTLDLDSLARDYPAFVQYHHREIERLHALPKTPSSMGIRRSIA

SEQ ID NO: 1919 - protein, 348 aa, unidentified
  REGION 1..348: note = Description of Unknown: uncultivated organism sequence
  REGION 1..348: note = Category: MG81 effectors
  REGION 1..348: note = Description: MG81-197 effector
MILVYRYRVKSLNGLLNKQARAVSYVWNFSNETQKHALKWNKRWPTGFDLNKLTTGSSRELGLHSGTVNAVCEQYAKSRKQHKRPYLRWRGKKSLGWVPIKGRDIKETPNGFHFHGREFKAFKSRNIPIGAKIKDGTSFSQDARGNWFLNVCIEVADVAVRAIRAGVGIDLGLKSFATLSTGEVIDNPRIFRSLEERIGKAQRGKKKRLAANLHTKVKNTRGDFLHKLSSRITKEFDYIAVGNVNAAGLAKTSMAKSVNDAGWSSFRRQLAYKAIRHGATFDEVDEKWTTQTCDACGVIAGPKGRAGLNERQWICVCGVKHDRDVNAALNILRSGSGHRAPVEGIPVL

SEQ ID NO: 1920 - protein, 522 aa, unidentified
  REGION 1..522: note = Description of Unknown: uncultivated organism sequence
  REGION 1..522: note = Category: MG81 effectors
  REGION 1..522: note = Description: MG81-198 effector
MKKSSTDTCCLTLPLKLEKWQSDRLEKRFEIGRQIYNTVVRAELKKLQQVERTPQYREIEQKLKEAKQEEAKELWKKRTQLLSKSGFSEYGFKSDMKYYYQHFKENIGSSVAVHGIASQVWTAFEKVLFSKDGKMVHFKKKGELSSLRGYSQAGKSGGIEIIFRGSYVEWKGLKLPLKLSPDNDYETEMLSKRVKYVRILRKDGKTKTHWYAQLALEGKPAVKRDSISGAPKHPIGHGVVGIDIGTRTLAYSADSKVDLIELADRVQNIEQEKMLLQRKLDRSRRATNPENYKPDGTIKKGVKLTRNKSKRYRKIQHQLAMLQHRQADIRKRQHNELANYLLTLGDCFFVEDMDYRALTRKAKKTEISEKTGRYKRKKRFGKSIANKAPSMLIALLDQKCKSLNLEGVKKVDTAVKASQYNHQTDECKAKELKERWNIMPDGERIQRDLYSAFLLQHCRRDLPEYNRKKLQETFGNELYRVFDREALQRDYPKFVEYHRETIQRLSALPKTIASMGIRRSIS

SEQ ID NO: 1921 - protein, 480 aa, unidentified
  REGION 1..480: note = Description of Unknown: uncultivated organism sequence
  REGION 1..480: note = Category: MG81 effectors
  REGION 1..480: note = Description: MG81-199 effector
MPEYREIERLIEATTDKKEKWALKNQKKQFLRKNGINRNTFTTDMKRLYKHFNDNIGSNVAQHGIVSQVLTAFEKVYIENQSGEVHFKKPGDLRSVQGYSQKKSGGVEIMFREGKIIWNQQGNNDRKGVAREFPLKLSPDNSYEAEMLKKHVKFVRILRKEGKTKPHWYAQLVLEGKPTVKRDPISGAPKHPVGHGVVGIDIGTRTLAYSTDSEVNLLELADRVQNIEQEKRRLQRKMDRSRRAMNPENYNSDGTFKRGVKLTRNKSKRYRRIQHQLAMIQHHQADIRKQQHNELANYLLTLGDCFFVENMSYCDLVHRANKTEISEKTGRYKRKKRFGKSIANKAPAMLITMLKQKCQSRGLEGVKEVDTHVRASQYNHQTDTCIEKALENRWNVMPDGERIQRDLYSAFLLQHCKQGLPEYDRKELKKEFGEELYRVFDREALQRDYPQFVAYHHMTIQQLSELPHTIPSMGIRRIIS

SEQ ID NO: 1922 - protein, 512 aa, unidentified
  REGION 1..512: note = Description of Unknown: uncultivated organism sequence
  REGION 1..512: note = Category: MG81 effectors
  REGION 1..512: note = Description: MG81-200 effector
MGKSSTDTCCLSLPLKLEKWQEDRLAKRFEIARQIYNTLVHAELKRLSQVKRSQQYREIENKIRALDRNDQEDKKELSLLYKLRDDLLRKSGFNDYGFKADIKYFYKHFGENIGANVAVHGIAPQVWSAFDSVLFKKRGKKVHYKKPGDICSLRGYSVTGKSGGSEIMFRGTYIEWKGLKMPLKLSPDNIYESEMLDHRVKYVRIVRKPGKRKDRWYAQLSLECKPVIKCDPVSGEMRHPVGKGPVGLDIGPQTLAYCALSEAGLVELADQVQDIEREKQRLQRRLDRSRRAANPNNYAADGTIKRGVKLTHNKSKRYCILQRELRYLQQQQAETRKRQHTELANYLLSLGDRFYVEDMNWSSLARRAKKTEISEKTGRYKRKKRFGKSIANKAPGSLIDILKQKCESLGIPGVEKLPTSLLKASQYNHQTGEYTPKPRSQRWNDMPDGERIQRDLYSAFLLQHYDPVSKGYDQAALQRDYPQFLQHHHHSIQRLTAKPKTPPSMGIHQRLR

SEQ ID NO: 1923 - protein, 579 aa, unidentified
  REGION 1..579: note = Description of Unknown: uncultivated organism sequence
  REGION 1..579: note = Category: MG81 effectors
  REGION 1..579: note = Description: MG81-201 effector
MAFGNKNSTPSFVLTLPIKVTKQDEIFLSKKFRVGCTVYNQMVTKTTKMWHQLRKTREYKNLIKAIKAAPANSDERKALLVQRSNLIKQAGFSEGAFHKLVVPYQKAYNVNCDVAQKVASAVWKAWGDFFYGKGKTVHYKRLDDFVTLSGKKNTNGIVFRPANHTVSSLESAKRKAKSSVEKKYFDAYRKLNAKKDEEVVLPDEVKAQMDKEVAAAVAKIKPCIGDGNLRIIYGKHEFLVKLRNPDTQTGRYQQEALKCGVKYCRIVRSWVGTKWKYYAQLVLEGYPPIKCDSNGVAKHPVEQGRIGVDIGTQTIAFCGKDVCDLRVLAPSAVVEARNGLTKEIARVMRQMDRSRRAMNPQYFNENGTVKRLKCKNGHKQIRHWNYSKNYYRLLHKLRDLNRKLAAVRKTEHYILANELLTYGNEFVVEDMNYKALQKRSKKTKINPKTGRARSKKRFGKSIGRCAPAMFISILNQKANRYGGSVIKVSTFETKASQFDHTDDSYTKKKLSQRFAKLSDGTVVQRDMYSAFLLLHLRKNLQSYNKKTIKKDFPLFKKLHDETKERLQNSHEWLPASVGF

SEQ ID NO: 1924 - protein, 353 aa, unidentified
  REGION 1..353: note = Description of Unknown: uncultivated organism sequence
  REGION 1..353: note = Category: MG81 effectors
  REGION 1..353: note = Description: MG81-202 effector
MSGKSGGTEIIFHKTYIAWKGLTLPLKLSPDNAYEKEMLMRRIKYVRILRKPGKHKDRWYAQLSLEGNPVVKLDPVSGLPRHPIGKGAVGIDIGPQTLAYSAEGGADLVELADQVQCIEQEKSRLQRKMDRSRRASNPDNYAQDGTIKRGVKLTHNKSRRYCKLQKELAYMLYRQAETRKRQHRELINRLLTMGDCFYIEDMHWNSLAHRAKKTEISEKTGRYKRKKRFGKSIANKAPAMLVDMLEQKCKSLELDVVMVNTSLKASQYNHQTGKYEKKTLSQRWNHMPDGEQIQRDLYSAFLLQHVVPEKNAFDNEALCRDYPKFVQYHHEVIERLRSLPKTISSMGIRRSVS

SEQ ID NO: 1925 - protein, 528 aa, unidentified
  REGION 1..528: note = Description of Unknown: uncultivated organism sequence
  REGION 1..528: note = Category: MG81 effectors
  REGION 1..528: note = Description: MG81-203 effector
MAKNNNNNNNTDTCVLTLPLRVEKWQEDCLLKRFEAARRIYNSLLNFELKKLRQLERTVEYRQIQSVISSAYRSNTKDSPECKDAFKRREKLISANGISENGFKSDVKFFYKHFDGLIGSNVAVHCIAVQLWAAFDKYLSGSGKEIHFKRLGDISSLKGYSVKGKSGGCEIIFRGQYVEWTRKKKKLLLPLKIDPDNEYEREMLSRRVKYVRIIKKPGKNRLRWYAQLTLEGKPALKYSAETGKPIHSVGKGNVGIDIGPQTVAYASDKEVALLELADRVTNIEHQKKKLQRKLDRSRRATNPDNYKPDGTIKCGVKLTRNKSKRYLKLQSKLAYIQHRQAEIRKLQHTCLANHMLTLGDRFFVEKMNWPGLAHRAKETSISEKTGRYKRKKRFGKSLANKAPAMFISILKRKCETLGLPGVVEVDTFRLRASQYNHLSDTYEKKSLSERWNYMPISDGSDSSKTKRIQRDLYSAFLLQHTIPQPCSFDKEALRIDYPNFVIMHDAEIHRLESLPKTITSMGVRRSHS

SEQ ID NO: 1926 - protein, 527 aa, unidentified
  REGION 1..527: note = Description of Unknown: uncultivated organism sequence
  REGION 1..527: note = Category: MG81 effectors
  REGION 1..527: note = Description: MG81-204 effector
MAKNNNNNNTDTCVLTLPLRVEKWQEDCLLKRFEAARRIYNSLLNFELKKLRQLERTVEYRQIQSVISSAYRSNTKDSPECKDAFKRREKLISANGISENGFKSDVKFFYKHFDGLIGSNVAVHCIAVQLWAAFDKYLSGSGKEIHFKRLGDISSLKGYSVKGKSGGCEIIFRGQYVEWTRKKKKLLLPLKIDPDNEYEREMLSRRVKYVRIIKKPGKNRLRWYAQLTLEGKPALKYSAETGKPIHSVGKGNVGIDIGPQTVAYASDKEVALLELADRVTNIEHQKKKLQRKLDRSRRATNPDNYKPDGTIKCGVKLTRNKSKRYLKLQSKLAYIQHRQAEIRKLQHTCLANHMLTLGDRFFVEKMNWPGLAHRAKETSISEKTGRYKRKKRFGKSLANKAPAMFISILKRKCETLGLPGVVEVDTFRLRASQYNHLSDTYEKKSLSERWNYMPISDGSDSSKTKRIQRDLYSAFLLQHTIPQPCSFDKEALRIDYPNFVIMHDAEIHRLESLPKTITSMGVRRSHS

SEQ ID NO: 1927 - protein, 512 aa, unidentified
  REGION 1..512: note = Description of Unknown: uncultivated organism sequence
  REGION 1..512: note = Category: MG81 effectors
  REGION 1..512: note = Description: MG81-205 effector
MPTKQKEGGNRCVLTLPLLTEPWQEHIIEKRFKIIEHLKNQLISIELRKLKNLQRTKAYKNLIKQIEFVPKSERTALYKERNKMLKDAGFSQYTFMDDMAGKKSLMQKHFESHINVQIAHKAAIDVWSSFEKFLFGSGQMIHYQKRGTLSSVASKSPKTGMFYYSDENIFKWSGGGTKPKGGIILCLRVASVKTNYEKEMVANNEIKYYRVVRKWMKTKYKYYLQITFAGKPADKHREISTGRVGIDIGTQTIAIASDKSVKLLELADKVNKNHIKKCELQRKLDRSRRYTNPDNFNPDGTVKRGTKGHKLKWNKSKHYIEIAGKIRELERKNADIRKYQHTCLANDILAMGNQIYIEPMNYKGLQKRAKETQVDEKGRYKKKKRFGKSLANKAPAMFVTILKTKAEQHGGEVYEVDIMSYRASQCDHTTGEYTKHGLNDRWRILGNGDKVQRDLYSAFLIKNSNKTHDEIDLDKCSKTYDNFKKLHDKEIENIRNEVKLRERRNISSYGIA

SEQ ID NO: 1928 - protein, 512 aa, unidentified
  REGION 1..512: note = Description of Unknown: uncultivated organism sequence
  REGION 1..512: note = Category: MG81 effectors
  REGION 1..512: note = Description: MG81-206 effector
MPTKQKEDSNRCVLTLPLLTEPWQEHIIEKRFKIIEHLKNQLISIELRKLKKLQRTKAYKNLIKQIESVPKSERTALYKERNKMLKDAGFSQYTFMDDMAGKKSLMQKHFESHINVQIAHKAAIDVWSSFEKFLFGSGQMIHYQKRGTLSSVASKSPKTGMFYYPDENIFKWSGGGTKPKGGIILCLRVASVKTNYEKEMVANNEIKYYRVVRKWMKTKYKYYLQITFAGKPADKHREISTGRVGIDIGTQTIAIASDKSVKLLELADKVNKNHIKKCELQRKLDRSRRYTNPDNFNPDGTVKRGTKGHKLKWNKSKHYLEIAGKIRELERKNADIRKYQHTCLANDILAMGNQIYIEPMNYKGLQKRAKETQVDEKGRYKKKKRFGKSLANKAPAMFVTILKTKAEQHGGEVYEVDIMSYRASQCDHTTGEYTKHGLNDRWRILGNGDKVQRDLYSAFLIKNSNKTHDEIDLDKCSKTYDNFKKLHDKEIENIRNEVKLRERKNISSYGIA

SEQ ID NO: 1929 - protein, 531 aa, unidentified
  REGION 1..531: note = Description of Unknown: uncultivated organism sequence
  REGION 1..531: note = Category: MG81 effectors
  REGION 1..531: note = Description: MG81-207 effector
MILLANNNNNNNNTDTCVLTLPLRVEKWQEDCLLKRFEAARRIYNSLLNFELKKLRQLERTVEYRQIQSVISSAYRSNTKDSPECKDAFKRREKLISANGISEYGFKSDVKFFYKHFDGLIGSSVAVHCIAVQLWAAFDKYLRGSGKEIHFKRLGEISSLKGYSVKGKSGGLEIIFRGQYIEWTRKKKKLLLPLKIDPDNEYEREMLSRRVKYVRIIKKPGKNRLRWYAQLTLEGKPALKYSAETGKPIHSVGKGNVGIDIGPQTVAYASDKEVALLELADRVTNIEHQKKKLQRKLDRSRRATNPDNYKPDGTIKRGVKLTRNKSKRYLKLQSKLAYIQHRQAEIRKLQHTCLANHMLTLGDRFFVEKMNWPGLAHRAKETSISEKTGRYKRKKRFGKSLANKAPAMFISILKRKCETLGLPGVVEVDTYNLKASQYNHLSDTYEKKSLSERWNYMPISDGSDSSKTKRIQRDLYSAFLLQHTIPQPCSFDKEALRIDYPNFVTMHDAEIHRLESLPKTVTSMGVRRSHS

SEQ ID NO: 1930 - protein, 538 aa, unidentified
  REGION 1..538: note = Description of Unknown: uncultivated organism sequence
  REGION 1..538: note = Category: MG81 effectors
  REGION 1..538: note = Description: MG81-208 effector
MNNEEKEKEGATCCLTLPLKLEKWQSDHLEKRFEIARQLYNTLVHAELKKKCQVERMPEYQEIMKMIDAASNQKEKWALEKKRKAFLEENGFSRNAFKADMEKYYKHFNDNIGANVALHGITAQVWIAFDKVFVDNYKQKGKVHFKKPGELCSVQGYSQKKSGGKEIMFREDRIIWNQQGNRDRKKVKREFLLKLSPDNPYEAEMLKRHVKFVRILRKDGKTKPHWYAQLVLEGKPAVKRDPISSAPKHPVGHGVVGIDIGTRTLAYSTDKEVNLLELADRVQNIEQEKRRLQRKMDRSRRAMNPENYNSDGTFKRGVKLTRNKSKRYRRIQHQLAMIQHHQADIRKQQHNELANYLLTLGDCFFVENMSYCDLVHRANKTEISEKTGRYKRKKRFGKSIANKAPAMLITMLKQKCQSRGLEGVKEVDTHVRASQYNHQTDTCIEKALENRWNVMPDGERIQRDLYSAFLLQHCKQGLPEYNRKELKKEFGEELYRVFDREALQRDYPQFVAYHHMTIQRLSELPHTIPSMGIRRIIS

SEQ ID NO: 1931 - protein, 511 aa, unidentified
  REGION 1..511: note = Description of Unknown: uncultivated organism sequence
  REGION 1..511: note = Category: MG81 effectors
  REGION 1..511: note = Description: MG81-209 effector
MKKSNTDTCCLTLPLKLEKWQEDRLAKRFEIARQIYNTMVHAELKKLRNIENSQPYRQIQKQIEALNWKNQNDKARLKSLYNDRNKLLNTIGFSEYGFKADIKYYYKHFNDNIGSSVAVHGIAPQVWAAFEKMLFHKEGKKVHYKKKDDIHSLHGYSVTGKSGGVEIIFRKTYIEWKGLKLPLKRSPDNAYETEMLGRRVKYVRLLRKPGKRKDCWYAQLSLEGKPAIKRDPESGERRHSIGRGAVGLDIGPQTLAYSACGAADLVELADQVQNIEQMKRRLQRKLDRSRRATNPDNYADNGTIRRGVKLTHNKSNRYRRTQRELRYLQHCQAEIRKRQHIELANHLLALGDCFYVEDMAWPSLTHRAKETAISEKTGRIKRKKRFGKSVANKAPATLIGILEQKCNSLGLPGVMKVPTSLRASQYNHQSGEYTSKPLSQRWNNMPDGERIQRDLYSAFLLQHYDPKAGNFDSALLQQDYPQFVQYHHRAIQRLSTVPKTLSSMGIQRSLR

SEQ ID NO: 1932 - protein, 538 aa, unidentified
  REGION 1..538: note = Description of Unknown: uncultivated organism sequence
  REGION 1..538: note = Category: MG81 effectors
  REGION 1..538: note = Description: MG81-210 effector
MILLANNNNNNNNNNNNNNNTDTCVLTLPLRVEKWQEDCLLKRFEAARRIYNSLLNFELKKLRQLERTVEYRQIQSVISSAYRSNTKDSPECKDAFKRREKLISANGISEYGFKSDVKFFYKHFDGLIGSSVAVHCIAVQLWAAFDKYLRGSGKEIHFKRLGEISSLKGYSVKGKSGGLEIIFRGQYVEWTRKKKKLLLPLKIDPDNEYEREMLSRRVKYVRIIKKPGKNRLRWYAQLTLEGKPALKYSAETGKPIHSVGKGDVGIDIGPQTVAYASDKEVALLELADRVTNIEHQKKKLQRKLDRSRRATNPDNYKPDGTIKRGVKLTRNKSKRYLKLQSKLAYIQHRQAEIRKLQHTCLANHMLTLGDRFFVEKMNWPGLAHRAKETSISEKTGRYKRKKRFGKSLANKAPAMFISILKQKCETLGLPGVVEVDTFRLKASQYNHLSDTCEKKSLSERWNYMPISDGSDSSKTKRIQRDLYSAFLLQHTIPQSCSFDKEALRIDYPNFVTMHDAEIHRLESLPKTITSMGVRRSHS

SEQ ID NO: 1933 - protein, 528 aa, unidentified
  REGION 1..528: note = Description of Unknown: uncultivated organism sequence
  REGION 1..528: note = Category: MG81 effectors
  REGION 1..528: note = Description: MG81-211 effector
MILLAKNNNNTDTCVLTLPLRVEKWQEDCLLKRFEAARRIYNSLLNFELKKLRQLERTVEYRQIQSVISSAYRSNTKDSPECKDAFKRREKLISANGISEYGFKSDVKFFYKHFDGLIGSNVAVHCIAVQLWAAFDKYLRGSGKEIHFKRLGDISSLKGYSVKGKSGGCEIIFRGQYIEWTRKKKKLLLPLKIDPDNEYEREMLSRRVKYVRIIKKPGKNRLRWYAQLTLEGKPALKYSAETGKPIHSVGKGNVGIDIGPQTVAYASDKEVALLELADRVTNIEHQKKKLQRKLDRSRRATNPDNYKPDGTIKRGVKLTRNKSKRYLKLQSKLAYIQHRQAEIRKLQHTCLANHMLTLGDRFFVEKMNWPGLAHRAKETSISEKTGRYKRKKRFGKSLANKAPAMFISILKRKCETLGLPGVVEVDTYSLKASQYNHLSDTYEKKSLSERWNYMPISDGSDSSKTKRIQRDLYSAFLLQHTIPQPCSFDKKALRIDYPNFVTMHDAEIHRLESLPKTITSMGVRRSHS

SEQ ID NO: 1934 - protein, 511 aa, unidentified
  REGION 1..511: note = Description of Unknown: uncultivated organism sequence
  REGION 1..511: note = Category: MG81 effectors
  REGION 1..511: note = Description: MG81-212 effector
MGKSSTDTCCLTLPLKLEKWQEDRLAKRFEIARQIYNTMVRAELKKLDRVKQLPEYRKNQKEIQALDWKNSADKQRLKELYGNQRKILQKQGFTEYGFKSDSKDYYKHFIENIGSSVATHGIAPQVWNAFDKMLFQKDGKVVHFKRYGDVHSLKGGSVTNKSGGAEIMFRKTYIEWKGLKLPLKLSPNNAYEAEMLSYRVKYVRILRTRGKTKDRWYAQLSLEGKPAVKYDSSTGKPVHPVGRGAVGLDIGPQTLAYAAANEANLVELADQVQNIEQEKRRLQRKLDRSRRATNPDNYNENGTIRRGVKLTHNKSKRYCKLQKELSWIQHYQAETRKRQHIALANHLLSLGDCFYVEPMAWPSLTHRAKKTEVSEKTGRIKRKKRFGKSVANKAPASLIGILKLKCISLGLTGVVEVPMLLKASQYNHQSKDYAPKSLSQRWNDMPDGNRIQRDLYSAFLLQHYDSRSESFDQETLERDYPQFVRLHNQTIQRLSALPKTPSSMGIRRSVS

SEQ ID NO: 1935 - protein, 528 aa, unidentified
  REGION 1..528: note = Description of Unknown: uncultivated organism sequence
  REGION 1..528: note = Category: MG81 effectors
  REGION 1..528: note = Description: MG81-213 effector
MILLTKNNNNTDTCVLTLPLRVEKWQEDCLLKRFEAARRIYNSLLNFELKKLRQLERTVEYRQIQSVISSAYRSNTKDSPECKDAFKRREKLISANGISENGFKSDVKFFYKHFDGLIGSNVAVHCIAVQLWAAFNKYLSGSGKEIHFKRLGEISSLKGYSVKGKSGGREIIFRGQYIEWTRKKKKLLLPLKIDPDNEYEREMLSRRVKYVRIIKKPGKNRLRWYAQLTLEGKPALKYSAETGKPIHSVGKGNVGIDIGPQTIAYASDKEVALLELADRVTNIEHQKKKLQRKLDRSRRATNPDNYKPDGTIKRGVKLTRNKSKRYLKLQSKLAYIQHRQAEIRKLQHTCLANHMLTLGDRFFVEKMNWPGLAHRAKETSISEKTGRYKRKKRFGKSLANKAPAMFISILKRKCETLGLPGVVEVDTFRLRASQYNHLSDTYEKKSLSERWNYMPISDGSDSSKTKRIQRDLYSAFLLQHTIPQPCSFDKEALRIDYPNFVIMHDAEIHRLESLPKTVTSMGVRRSHS

SEQ ID NO: 1936 - protein, 528 aa, unidentified
  REGION 1..528: note = Description of Unknown: uncultivated organism sequence
  REGION 1..528: note = Category: MG81 effectors
  REGION 1..528: note = Description: MG81-214 effector
MILLTKNNNNTDTCVLTLPLRVEKWQEDCLLKRFEAARRIYNSLLNFELKKLRQLERTVEYRQIQSVISSAYRSNTKDSPECKDAFKRREKLISANGLAEYGFKSDVKFFYKHFDGLIGSNVAVHCIAVQLWAAFNKYLSGSGKEIHFKRLGEISSLKGYSVKGKSGGREIIFRGQYIEWTRKKKKLLLPLKIDPDNEYEREMLSRRVKYVRIIKKPGKNRLRWYAQLTLEGKPALKYSAETGKPIHSVGKGNVGIDIGPQTIAYASDKEVALLELADRVTNIEHQKKKLQRKLDRSRRATNPDNYKPDGTIKRGVKLTRNKSKRYLKLQSKLAYIQHRQAEIRKLQHTCLANHMLTLGDRFFVEKMNWSGLAHRAKETSISEKTGRYKRKKRFGKSLANKAPAMFISILKRKCETLGLPGVVEVDTYSLKASQYNHLSDTYEKKSLSERWNYMPISDGSDSSKTKRIQRDLYSAFLLQHTIPQPCSFDKEALRIDYPNFVIMHDAEIHRLESLPKTVTSMGVRRSHS

SEQ ID NO: 1937 - protein, 561 aa, unidentified
  REGION 1..561: note = Description of Unknown: uncultivated organism sequence
  REGION 1..561: note = Category: MG81 effectors
  REGION 1..561: note = Description: MG81-215 effector
MSNLLFLLENEEKEKDGATCCLTLPLKLEKWQSDHLEKRFEIARQLYNTLVHAELKRIHRIERMPEYREIERQIEATTDKKEKWALKNQKKQFLRKNGINRNTFTTDMKRLYKHFNDNIGSNVAQHGIVSQVLTAFEKVYIENQSGEVHFKKPGDLRSVQGYSQKESGGKEIMFRNGKIIWTQQENDDRKKSPKYQQRKKRQNYKGVKGIAREFPVVFSKNNPYEAEMLTKHVKFVRILRKDGKTKPHWYAQLVLEGTPVAKYDPISGAPKHPVGHGVVGIDIGTRTLAYSTDSEVNLLELADRVQNIEQEKRRLQRKMDRSRRAMNPENYNSDGTFKRGVKLTRNKSKRYRRIQHQLAMIQHHQADIRKQQHNELANYLLTLGDCFFVENMSYCDLVHRANKTEISEKTGRYKRKKRFGKSIANKAPAMLITMLKQKCQSRGLEGVKEVDTHVRASQYNHQTDTCIEKALENRWNVMPDGERIQRDLYSAFLLQHCKQGLPEYNRKELKKEFGEELYRVFDREALQRDYPQFVAYHHMTIQRLSELPHTIPSMGIRRIIS

SEQ ID NO: 1938 - protein, 531 aa, unidentified
  REGION 1..531: note = Description of Unknown: uncultivated organism sequence
  REGION 1..531: note = Category: MG81 effectors
  REGION 1..531: note = Description: MG81-216 effector
MILLANNNNNNNNTDTCVLTLPLRVEKWQEDCLLKRFEAARRIYNSLLNFELKKLRQLERTVEYRQIQSVISSAYRSNTKDSLECKDAFKRREKLISANGISENGFKSDVKFFYKHFDGLIGSNVAVHCIAVQLWAAFDKYLSGSGKEIHFKRLGDISSLKGYSVKGKSGGCEIIFRGQYVEWTRKKKKLLLPLKIDPDNEYEREMLSRRVKYVRIIKKPGKNRLRWYAQLTLEGKPALKYSAGTGKPIHSVGKGNVGIDIGPQTVAYASDKEVALLELADRVTNIEHQKKKLQRKLDRSRRATNPDNYKPDGTIKRGVKLTRNKSKRYLKLQSKLAYIQHRQAEIRKLQHTCLANHMLTLGDRFFVEKMNWPGLAHRAKETSISEKTGRYKRKKRFGKSLANKAPAMFISILKRKCETLGLPGVVEVDTYNLKASQYNHLSDTYEKKSLSERWNYMPISDGSDSSKTKRIQRDLYSAFLLQHTIPQPCSFDKEALRIDYPNFVIMHDAEIHRLESLPKTVTSMGVRRSHS

SEQ ID NO: 1939 - protein, 534 aa, unidentified
  REGION 1..534: note = Description of Unknown: uncultivated organism sequence
  REGION 1..534: note = Category: MG81 effectors
  REGION 1..534: note = Description: MG81-217 effector
MILLANNNNNNNNNNNTDTCVLTLPLRVEKWQEDCLLKRFEAARRIYNSLLNFELKKLRQLERTVEYRQIQSVISSAYRSNTKDSPECKDAFKRREKLISANGISENGFKSDVKFFYKHFDGLIGSNVAVHCIAVQLWAAFDKFLSGSGKEIHFKRLGDISSLKGYSVKGKSGGREIIFRGQYVEWTKKKKKLLLPLKIDPDNEYEREMLSRRVKYVRIIKKPGKNRLRWYAQLTLEGKPALKYSAETGKPIHSVGKGNVGIDIGPQTVAYASDKEVALLELADRVTNIEHQKKKLQRKLDRSRRATNPDNYKPDGTIKRGVKLTRNKSKRYLKLQSKLAYIQHRQAEIRKLQHTCLANHMLTLGDRFFVEKMNWPGLAHRAKETSISEKTGRYKRKKRFGKSLANKAPAMFISILKRKCETLGLPGVVEVDTYSLKASQYNHLSDTYEKKSLSERWNYMPISDGSDSSKTKRIQRDLYSAFLLQHTIPHPCSFDKEALRIDYPNFVIMHDAEIHRLESLPKTVTSMGVRRSHS

SEQ ID NO: 1940 - protein, 534 aa, unidentified
  REGION 1..534: note = Description of Unknown: uncultivated organism sequence
  REGION 1..534: note = Category: MG81 effectors
  REGION 1..534: note = Description: MG81-218 effector
MANNNNNNNNNNNNNNTDTCVLTLPLRVEKWQEDCLLKRFEAARRIYNSLLNFELKKLRQLERTVEYRQIQSVISSAYRSNTKDSPECKDAFKRREKLISANGISENGFKSDVKFFYKHFDGLIGSNVAVHCIAVQLWAAFDKYLSGSGKEIHFKRLGDISSLKGYSVKGKSGGREIIFRGQYVEWTRKKKKLLLPLKIDPDNEYEREMLSRRVKYVRIIKKPGKNRLRWYAQLTLEGKPALKYSAETGKPIHSVGKGNVGIDIGPQTVAYASDKEVALLELADRVTNIEHQKKKLQRKLDRSRRATNPDNYKPDGTIKRGVKLTRNKSKRYLKLQSKLAYIQHRQAEIRKLQHTCLANHMLTLGDRFFVEKMNWPSLAHRAKETSISEKTGRYKRKKRFGKSLANKAPAMFISILKRKCETLGLPGVVEVDTYSLKASQYNHLSDTYEKKSLSERWNYMPISDGSDSSKTKRIQRDLYSAFLLQHTIPQPCSFDKEALRIDYPNFVTMHDAEIHRLESLPKTITSMGVRRSHS

SEQ ID NO: 1941 - protein, 527 aa, unidentified
  REGION 1..527: note = Description of Unknown: uncultivated organism sequence
  REGION 1..527: note = Category: MG81 effectors
  REGION 1..527: note = Description: MG81-219 effector
MAKNNNNNNTDTCVLTLPLRVEKWQEDCLLKRFEAARRIYNSLLNFELKKLRQLERTVEYRQIQSVISSAYRSNTKDSPECKDAFKRREKLISANGISENGFKSDVKFFYKHFDGLIGSNVAVHCIAVQLWAAFDKYLSGSGKEIHFKRLGDISSLKGYSVKGKSGGGEIIFRGQYVEWTRKKKKLLLPLKIDPDNEYEREMLSRRVKYVRIIKKPGKNRLRWYAQLTLEGKPALKYSAETGKPIHSVGKGNVGIDIGPQTVAYASDKEVALLELADRVTNIEHQKKKLQRKLDRSRRATNPDNYKPDGTIKCGVKLTRNKSKRYLKLQSKLAYIQHRQAEIRKLQHTCLANHMLTLGDRFFVEKMNWPGLAHRAKETSISEKTGRYKRKKRFGKSLANKAPAMFISILKRKCETLGLPGVVEVDTFRLRASQYNHLSDTYEKKSLSERWNYMPISDGSDSSKTKRIQRDLYSAFLLQHTIPQPCSFDKEALRIDYPNFVIMHDAEIHRLESLPKTITSMGVRRSHS

SEQ ID NO: 1942 - protein, 540 aa, unidentified
  REGION 1..540: note = Description of Unknown: uncultivated organism sequence
  REGION 1..540: note = Category: MG81 effectors
  REGION 1..540: note = Description: MG81-220 effector
MMYNTKYQAKRGDPVGEKNNNDTDTCVLTLPLRVEKWQEDCLLKRFEAARRIYNSLLNFELKKLRQLERTVEYRQIQSVISSAYRSNTKDSPECKDAFKRRKKLTDENGISEYGFKSDVKFFYKHFDGLIGSSVAVHCIAVQLWAAFDKYLRGNGKEIHFKRLGDISSLKGYSVRGKSGGCEIIFRGQYVEWTRKKKKLLLPLKIDPDNEYEREMLSRRVKYVRIIKKPGKNRLRWYAQLTLEGKPALKYSAETGKPIHSVGKGNVGIDIGPQTVAYASDKEVALLELADRVTNIEHQKKKLQRKLDRSRRTTNPDNYKPDGTIKRGVKLTRNKSKRYLKLQSKLAYIQHRQAEIRKLQHTCLANHMLTLGDRFFVEKMNWPGLAHRAKETSISEKTGRYKRKKRFGKSLANKAPAMFISILKRKCETLGLPGVVEVDTYSLRASQYNHLSDTYEKKSLSERWNYMPISDGSDSSKTKRIQRDLYSAFLLQHTIPQPCSFDKEALRIDYPNFVTMHDAEIHRLESLPKTVTSMGVRRSHS

SEQ ID NO: 1943 - protein, 511 aa, unidentified
  REGION 1..511: note = Description of Unknown: uncultivated organism sequence
  REGION 1..511: note = Category: MG81 effectors
  REGION 1..511: note = Description: MG81-221 effector
MGKSSTNTCCLTLPLKLEKWQEDRLAKRFEIARQIYNTMVRAELKRLRQVEQSPQYRSNKKAIQALDWKNTADKPKLKTLYRERDKLLKGGGFTEYGFKSDIKNFYKHFAENIGSSVAVHGIAPQVWAAFERVLFKKEGKKVHFKKTGDIRSLRGYSVTGKSGGVEIIFRGSYIEWKGLNLPLKLSPDNAYETEMLSYRVKYVRILRKPGKTRDRWYAQLSLEGKPAIKRNPASGNPVHPVGQGAVGLDIGPQTLAYAAEKEANLVELADRVQNIEQEKHLLQRKMDRSRRAANPDNYAENGTIRRGVKLTHNKSKRYLRLQRELCYLQHCQAETRKRQHTELANHLLSLGSCFYVEDMAWPSLTHRAKKTEISDKTGRIKRKKRFGKSIANKAPAALINILRTKCVSLGIPGVVEVPTSLKASQYNHQSKEYTPKPLSQRWNDMPDGSRIQRDLYSAFLLQHYDPQSGNFDQASLEADYPQFVQLHNQSIQRLLTVPKTPSSMGIRRSVS

SEQ ID NO: 1944 - protein, 524 aa, unidentified
  REGION 1..524: note = Description of Unknown: uncultivated organism sequence
  REGION 1..524: note = Category: MG81 effectors
  REGION 1..524: note = Description: MG81-222 effector
MAKNNNTDTCVLTLPLRVEKWQEDCLLKRFEAARRIYNSLLNFELKKLRQLERTVEYRQIQSVISSAYRSNTKDSPECKDAFKRREKLISANGISENGFKSDVKFFYKHFDGLIGSSVAVHCIAVQLWAAFDKYLSGSGKEIHFKRLGDISSLKGYSVKGKSGGCEIIFRGQYVEWTRKKKKLLLPLKIDPDNEYEREMLSRRVKYVRIIKKPGKNRLRWYAQLTLEGKPALKYSAETGKPIHSVGKGNVGIDIGPQTVAYASDKEVALLELADRVTNIEHQKKKLQRKLDRSRRATNPDNYKPDGTIKRGVKLTRNKSKRYLKLQSKLAYIQHRQAEIRKLQHTCLANHMLTLGDRFFVEKMNWPGLAHRAKETSISEKTGRYKRKKRFGKSLANKAPAMFISILKRKCETLGLPGVVEVDTFRLRASQYNHLSDTYEKKSLSERWNYMPISDGSDSSKTKRIQRDLYSAFLLQHTIPQPCSFDKEALRIDYPNFVIMHDAEIHRLESLPKTITSMGVRRSHS

SEQ ID NO: 1945 - protein, 526 aa, unidentified
  REGION 1..526: note = Description of Unknown: uncultivated organism sequence
  REGION 1..526: note = Category: MG81 effectors
  REGION 1..526: note = Description: MG81-223 effector
MAKKNNNDTDTCVLTLPLRVEKWQEDCLLKRFEAARRIYNSLLNFELKKLRQLERTVEYRQIQSVISSAYRSNTKDSPECKDAFKRREKLISANGISEYGFKSDVKFFYKHFDGLIGSSVAAHCIAVQLWAAFDKYLRGSGKEIHFKRLGEISSLKGYSVKGKSGGLEIIFRGQYVEWTRKKKKLLLPLKIDPDNEYEREMLSRRVKYVRIIKKPGKNRLRWYAQLTLEGKPALKYSAETGKPIHSVGKGDVGIDIGPQTVAYASDKEVALLELADRVTNIEHQKKKLQRKLDRSRRATNPDNYKPDGTIKRGVKLTRNKSKRYLKLQSKLAYIQHRQAEIRKLQHTCLANHMLTLGDRFFVEKMNWPGLAHRAKETSISEKTGRYKRKKRFGKSLANKAPAMFISILKRKCETLGLPGVVEVDTFRLKASQYNHLSDTYEKKSLSERWNYMPISDGSDSSKTKRIQRDLYSAFLLQHTIPQPCSFDKEALREDYPNFVTMHDAEIHRLEYLPKTITSMGVRRSHS

SEQ ID NO: 1946 - protein, 529 aa, unidentified
  REGION 1..529: note = Description of Unknown: uncultivated organism sequence
  REGION 1..529: note = Category: MG81 effectors
  REGION 1..529: note = Description: MG81-224 effector
MANNNNNNNNNTDTCVLTLPLRVEKWQEDCLLKRFEAARRIYNSLLNFELKKLRQLERTVEYRQIQSVISSAYRSNTKDSPECKDAFKRREKLISANGISENGFKSDVKFFYKHFDGLIGSNVAVHCIAVQLWAAFDKYLSGSGKEIHFKRLGDISSLKGYSVKGKSGGCEIIFRGQYVEWTRKKKKLLLPLKIDPDNEYEREMLSRRVKYVRIIKKPGKNRLRWYAQLTLEGKPALKYSAGTGKPIHSVGKGNVGIDIGPQTVAYASDKEVALLELADRVTNIEHQKKKLQRKLDRSRRATNPDNYKPDGTIKRGVKLTRNKSKRYLKLQSKLAYIQHRQAEIRKLQHTCLANHMLTLGDRFFVEKMNWPGLAHRAKETSISEKTGRYKRKKRFGKSLANKAPAMFISILKRKCETLGLPGVVEVDTFRLRASQYNHLSDTYEKKSLSERWNYMPISDGSDSSKTKRIQRDLYSAFLLQHTIPQPCSFDKEALRIDYPNFVIMHDAEIHRLESLPKTITSMGVRRSHS

SEQ ID NO: 1947 - protein, 528 aa, unidentified
  REGION 1..528: note = Description of Unknown: uncultivated organism sequence
  REGION 1..528: note = Category: MG81 effectors
  REGION 1..528: note = Description: MG81-225 effector
MILLANNNNNTDTCVLTLPLRVEKWQEDCLLKRFEAARRIYNSLLNFELKKLRQLERTVEYRQVQSVISNAYRSNTKDSPECKAALKRREKLIDENGLTKNGFKNDVKFFYKHFDGLIGSSVAVHCIAVQLWAAFNKYLCGNGKEIHFKRLGDISSLKGYSVKGKSGGCEIIFRGQYVEWTRKKKKLLLPLKIDPDNEYEREMLSRRVKYVRIIKKPGKNRLRWYAQLTLEGKPALKYSAETGKPIHSVGKGDVGIDIGPQTVAYASDKEVALLELADRVTNIEHQKKKLQRKLDRSRRATNPDNYKPDGTIKRGVKLTRNKSKRYLKLQSKLAYIQHRQAEIRKLQHTCLANHMLTLGDRFFVEKMNWPGLAHRAKETSISEKTGRYKRKKRFGKSLANKAPAMFISILKQKCETLGLPGVVEVDTFRLKASQYNHLSDTCEKKSLSERWNYMPISDGSDSSKTKRIQRDLYSAFLLQHTIPQSCSFDKEALRIDYPNFVTMHDAEIHRLESLPKTITSMGVRRSHS

SEQ ID NO: 1948 - protein, 528 aa, unidentified
  REGION 1..528: note = Description of Unknown: uncultivated organism sequence
  REGION 1..528: note = Category: MG81 effectors
  REGION 1..528: note = Description: MG81-226 effector
MILLANNNNNTDTCVLTLPLRVEKWQEDCLLKRFEAARRIYNSLLNFELKKLRQLERTVEYRQIQSVISSAYRSNTKDSPECKAALKRREKLIDENGLTKNGFKNDVKFFYKHFDGLIGSNVAVHCIAVQLWAAFDKYLRGSGKEIHFKRLGDISSLKGYSVKGKSGGREIIFRGQYIEWTRKKKKLLLPLKIDPDNEYEREMLSRRVKYVRIIKKPGKNRLRWYAQLTLEGKPALKYSAGTGKPIHSVGKGNVGIDIGPQTVAYASDKEVALLELADRVTNIEHQKKKLQRKLDRSRRATNPDNYKPDGTIKRGVKLTRNKSKRYLKLQSKLAYIQHRQAEIRKLQHTCLANHMLTLGDRFFVEKMNWPGLAHRAKETSISEKTGRYKRKKRFGKSLANKAPAMFISILKRKCETLGLPGVVEVDTYSLKASQYNHLSDTYEKKSLSERWNYMPISDGSDSSKTKRIQRDLYSAFLLQHTIPQPCSFDKEALRIDYPNFVTMHDAEIHRLESLPKTVTSMGVRRSHS

SEQ ID NO: 1949 - protein, 530 aa, unidentified
  REGION 1..530: note = Description of Unknown: uncultivated organism sequence
  REGION 1..530: note = Category: MG81 effectors
  REGION 1..530: note = Description: MG81-227 effector
MILLANNNNNNNTDTCVLTLPLRVEKWQEDCLLKRFEAARRIYNSLLNFELKKLRQLERTVEYRQIQSVISSAYRSNTKDSPECKDAFKRREKLISANGISKNGFKSDVKFFYKHFDGLIGSSVAVHCIAVQLWAAFDKYLSGSGKEIHFKRLGDISSLKGYSVKGKSGGCEIIFRGQYVEWTRKKKKLLLPLKIDPDNEYEREMLSRRVKYVRIIKKPGKNRLRWYAQLTLEGKPALKYSAETGKPIHSVGKGNVGIDIGPQTVAYASDKEVALLELADRVTNIEHQKKKLQRKLDRSRRATNPDNYKPDGTIKRGVKLTRNKSKRYLKLQSKLAYIQHRQAEIRKLQHTCLANHMLTLGDRFFVEKMNWPGLAHRAKETSISEKTGRYKRKKRFGKSLANKAPAMFISILKRKCETLGLPGVVEVDTYNLKASQYNHLSDTCEKKSLSERWNYMPISDGSDSSKTKRIQRDLYSAFLLQHTIPQPCSFDKEALRIDYPNFVIMHDAEIHRLESLPKTITSMGVRRSHS

SEQ ID NO: 1950 - protein, 529 aa, unidentified
  REGION 1..529: note = Description of Unknown: uncultivated organism sequence
  REGION 1..529: note = Category: MG81 effectors
  REGION 1..529: note = Description: MG81-228 effector
MILLANNNNNNTDTCVLTLPLRVEKWQEDCLLKRFEAARRIYNSLLNFELKKLRQLERTVEYRQIQSVISSAYRSNTKDSLECKDAFKRRKKLTDANGISENGFKSDVKFFYKHFDGLIGSNVAVHCIAVQLWAAFDKYLSGSGKEIHFKRLGDISSLKGYSVKGKSGGCEIIFRGQYVEWTRKKKKLLLPLKIDPDNEYEREMLSKRVKYVRIIKKPGKNRLRWYAQLTLEGKPALKYSAETGKPIHSVGKGNVGIDIGPQTVAYASDKEVALLELADRVTNIEHQKKKLQRKLDRSRRATNPDNYKPDGTIKRGVKLTRNKSKRYLKLQSKLAYIQHRQAEIRKLQHTCLANHMLTLGDRFFVEKMNWPGLAHRAKETSISEKTGRYKRKKRFGKSLANKAPAMFISILKRKCETLGLPGVVEVDTYSLKASQYNHLSDTYEKKSLSERWNYMPISDGSDSSKTKRIQRDLYSAFLLQHTIPQPCSFDKEALRIDYPNFVTMHDAEIHRLESLPKTITSMGVRRSHS

SEQ ID NO: 1951 - protein, 529 aa, unidentified
  REGION 1..529: note = Description of Unknown: uncultivated organism sequence
  REGION 1..529: note = Category: MG81 effectors
  REGION 1..529: note = Description: MG81-229 effector
MILLAKNNNNNTDTCVLTLPLRVEKWQEDCLLKRFEAARRIYNSLLNFELKKLRQLERTVEYRQIQSVISSAYRSNTKDSPECKDAFKRREKLISANGISEYGFKSDVKFFYKHFDGLIGSSVAVHCIAVQLWAAFDKYLSGSGKEIHFKRLGDISSLKGYSVKGKSGGREIIFRGQYIEWTRKKKKLLLPLKIDPDNEYEREMLSRRVKYVRIIKKPGKNRLRWYAQLTLEGKPALKYSAGTGKPIHSVGNGDVGIDIGPQTVAYASDKEVALLELADRVTNIEHQKKKLQRKLDRSRRATNPDNYKPDGTIKRGVKLTHNKSKRYLKLQSKLAYIQHRQAEIRKLQHTCLANHMLTLGDRFFVEKMNWPGLAHRAKETSISEKTGRYKRKKRFGKSLANKAPAMFISILKRKCETLGLPGVVEVDTYSLKASQYNHLSDTYEKKSLSERWNYMPISDGSDSSKTKRIQRDLYSAFLLQHTIPQPCSFDKEALRIDYPNFVTMHDAEIHRLGSLPKTITSMGVRRSHS

SEQ ID NO: 1952 - protein, 511 aa, unidentified
  REGION 1..511: note = Description of Unknown: uncultivated organism sequence
  REGION 1..511: note = Category: MG81 effectors
  REGION 1..511: note = Description: MG81-230 effector
MAKCSTDTCCLTLPLRLEKWQEDRLAKRFEIARQIYNTMVRAELKKLRAMEQSEPYKANQEKIQALDWKTQTDKQALKALYKERDKLLRDGGFSEYGFKSDIKNYYKHFNNNIGSNVAFHGIAPQVWAAFEKMLFKKEGKKVHFKKKGDIHSLRGYSAAGKSGGVEIIFRETYIEWKGLKLPLKLPPDNIYETQMLSYRVKYVRLLRKPGKRKDRWYAQLSLEGKPVIKYNPKTGEVRHPIGKGAVGLDIGPQTLAYSAATGADLVELANQVQNVEQEKRRLQRKLDRSRRATNPGNYADDGTIRRGIALTHNKSKRYLRTQQELKYLQHQQAEIRKRQHTELANHLLSLGDCFYVEKMVWTSLTHRAKETEISEKTGKIKRKKRFGKSVANKAPATLIGILQRKSAALGIPGVIEVPTSVKASQYNHQSGTYTPKPLSQRWNNMPDGERIQRDLYSAFLLQHYDPQTNTFDANSLHQDYPQFVQYHHDAVLRLYAMPKTPSSMGIKRSLR

SEQ ID NO: 1953 - protein, 511 aa, unidentified
  REGION 1..511: note = Description of Unknown: uncultivated organism sequence
  REGION 1..511: note = Category: MG81 effectors
  REGION 1..511: note = Description: MG81-231 effector
MAKCSTDTCCLTLPLRLEKWQEDRLAKRFEIARQIYNTMVRAELKKLRAMEQSEPYKANQEKIQALDWKTQADKQTLKALYKERDKLLRDGGFSEYGFKSDIKNYYKHFNNNIGSSVAVHGIAPQVWAAFEKMLFKKEGKKVHFKKKGDIRSLRGYSATGKSGGVEIIFRETYIEWKGLKLPLKLSPDNIYETQMLSYRVKYVRLLRKPGKRKDRWYAQLSLEGKPVIKYNPKTGEVRHPIGKGAVGLDIGPQTLAYSAATGADLVELANQVQNVEQEKRRLQRKLDRSRRATNPGNYADDGTIRRGIALTHNKSKRYLRTQQELKYLQHQQAEIRKRQHTELANHLLSLGDCFYVEKMVWTSLTHRAKETEISEKTGKIKRKKRFGKSVANKAPATLIGILQRKSAALGIPGVIEVPTSVKASQYNHQSGTYTPKPLSQRWNNMPDGERIQRDLYSAFLLQHYDPQTNTFDANSLHQDYPQFVQYHHDAVLRLYAMPKTPSSMGIKRSLR

SEQ ID NO: 1954 - protein, 511 aa, unidentified
  REGION 1..511: note = Description of Unknown: uncultivated organism sequence
  REGION 1..511: note = Category: MG81 effectors
  REGION 1..511: note = Description: MG81-232 effector
MAQRHSTPTCCLTLPLQLEKWQEDRLIKRFEIAGKIYNALLNAELKKLHRLEQLPEYKEIQSQLKAYYQNNLPKTAAFKELNNRRSKLLSEHGFSEYAFKGDMKKFYKHFSSNIGSSVATHCIASQVWSAFEKRLFGGGKFVHFKKSGDIRSLKGFSSSRKSGGVEIMFRGDHIEWKGLLLRLKLDPDNQYESEMLSRRIKYVRIIRKPGKAKWRWYAQLSVEGLPAIKRNDETGEPVHPIGRGAVGIDIGPQTIAYVSQTEVALKELADRVQNIEHEKRLIQRKLDRSRRATNPANYDDNGTIKRGVKLTRNKSKRYLKLQMELSFLQHKQAEIRKQQHINLANHLLSLGDCFYVEDMAWSSLARKAKETAVSEKTGKYKRKKRFGKSIANKAPASLISILDQKCTSLGLLGVIKVPTSVRASQYNHITKSYEKKTLSQRWNIMPDGRRIQRDIYSAFLLQHVTPQRDGFSDEALQQDYENFVSLHDSVIQQLRLMPKTIASMGIRRTYS

SEQ ID NO: 1955 - protein, 528 aa, unidentified
  REGION 1..528: note = Description of Unknown: uncultivated organism sequence
  REGION 1..528: note = Category: MG81 effectors
  REGION 1..528: note = Description: MG81-233 effector
MAKNNNNNNNTDTCVLTLPLRVEKWQEDCLLKRFEAARRIYNSLLNFELKKLRQLERTVEYRQIQSVISSAYRSNTKDSPECKAALKRREKLIDENGLTKNGFKNDVKFFYKHFDGLIGSSVAVHCIAVQLWAAFNKYLCGNGKEIHFKRLGDISSLKGYSVKGKSGGCEIIFRGQYVEWTRKKKKLLLPLKIDPDNEYEREMLSRRVKYVRIIKKPGKNRLRWYAQLTLEGKPALKYSAETGKPIHSVGKGDVGIDIGPQTVAYASDKEVALLELADRVTNIEHQKKKLQRKLDRSRRATNPDNYKPDGTIKRGVKLTRNKSKRYLKLQSKLAYIQHRQAEIRKLQHTCLANHMLTLGDRFFVEKMNWPGLAHRAKETSISEKTGRYKRKKRFGKSLANKAPAMFISILKQKCETLGLPGVVEVDTFRLKASQYNHLSDTCEKKSLSERWNYMPISDGSDSSKTKRIQRDLYSAFLLQHTIPQSCSFDKEALRIDYPNFVTMHDAEIHRLESLPKTITSMGVRRSHS

SEQ ID NO: 1956 - protein, 376 aa, unidentified
  REGION 1..376: note = Description of Unknown: uncultivated organism sequence
  REGION 1..376: note = Category: MG81 effectors
  REGION 1..376: note = Description: MG81-234 effector
MISALSGTISRHKNKIVKITLKFRLRDKHAAELNRQAHAVNFVWNYCNETQQKAVAYQRRWLSGYDLWKLVAGCAKQGLDLQAHSAMRVCMQYDKSRRQHKKRWLRWRGKKSLGWVPFNTDAVKFRGGAFVFRKTRYETMHLREMKDGIKIGAGSFNQDSRGRRYLNCPVDIAEANSAPNARVGIDLGLHSFATTSDGEKIKAPQFYRKNEAFLATAQRAKKTKRVKAIHAKIANRRKDFLHKESAKLTKQYGLIVVGDVSPSKLAKTLMAKSVLDAGWADFKNTLRYKSIRNGGSTIEVSEAYSSQVCSACGSLPASRPKGIANLGIREWTCDCCGTVHDRDCNAAKNILRSGLATLVEGARQNGSSHDERKQMN

SEQ ID NO: 1957 - protein, 509 aa, unidentified
  REGION 1..509: note = Description of Unknown: uncultivated organism sequence
  REGION 1..509: note = Category: MG81 effectors
  REGION 1..509: note = Description: MG81-235 effector
MPYSDVLKVVALSDKIRKAGNELVGLMRKNYNQLMRTKRYRKLLFLYGNTKDKDKRKTYAKQLNEMQKAYNITWEYCRTSMIPIGKKYGVDAVFALTKAEDIWRGIEKCLYGNGNAVHFSRYGELPCIRAKQINRGIPISVTDNKLHFKLGRMVFGIQINDRFQHDEVDAVLSYLAESEILDDRAVNTLIKDGCCIDTYRPCYATLVPRMIRGKYRVYLHLTIEGKAKPKYDKHGSPRHKLGKGMIGADIGTQTVAYTSDTEVGLKNLSERGNSIQTSERKERLLHRAMDRSRRATNPQNYNDDGTVKKGRKTWIYSNHYKKLKEKYSELCRINAINRQLAINEDANHLRSLGDVFITEPKNAGKLMRRAKETTVNSKGKFNRKKRFGRSIKNRCPSGFQTAVEQKFKVSGGIYIEVSNDYRASQYDHTIDDYIKKKLSDRMYKLQDGTEVQRDWYSSFLLYCYDYRTKDINKNKCISEFDKCYNKEKALIEWIKVNEIKVLNSGIKIA

SEQ ID NO: 1958 - protein, 527 aa, unidentified
  REGION 1..527: note = Description of Unknown: uncultivated organism sequence
  REGION 1..527: note = Category: MG81 effectors
  REGION 1..527: note = Description: MG81-236 effector
MAKKNNNNNTDTCVLTLPLRVEKWQEDCLLKRFEAARRIYNSLLNFELKKLRQLERTVEYRQIQSVISSAYRSNTKDSPECKAALKRREKLIDENGLTKNGFKNDVKFFCKHFDGLIGSSVAVHCIAVQLWAAFNKYLCGNGKEIHFKRLGDISSLKGYSVKGKSGGCEIIFRGQYVEWTRKKKKLLLPLKIDPDNEYEREMLSRRVKYVRIIKKPGKNRLRWYAQLTLEGKPALKYSAETGKPIHSVGKGDVGIDIGPQTVAYASDKEVALLELADRVTNIEHQKKKLQRKLDRSRRATNPDNYKPDGTIKRGVKLTRNKSKRYLKLQSKLAYIQHRQAEIRKLQHTCLANHMLTLGDRFFVEKMNWPGLAHRAKETSISEKTGRYKRKKRFGKSLANKAPAMFISILKQKCETLGLPGVVEVDTFRLKASQYNHLSDTCEKKSLSERWNYMPISDGSDSSKTKRIQRDLYSAFLLQHTIPQSCSFDKEALRIDYPNFVTMHDAEIHRLESLPKTITSMGVRRSHS

SEQ ID NO: 1959 - protein, 511 aa, unidentified
  REGION 1..511: note = Description of Unknown: uncultivated organism sequence
  REGION 1..511: note = Category: MG81 effectors
  REGION 1..511: note = Description: MG81-237 effector
MAQRHSTPTCCLTLPLQLEKWQEDRLIKRFEIAGKIYNALLNAELKKLHRLEQLPEYKEIQSQLKAYYQNNLPKTAAFKELNNRRSKLLSEHGFSEYAFKGDIKKFYKHFSSNIGSSVATHCIASQVWSAFEKRLFGGGKFVHFKKSGDIRSLKGFSSSRKSGGVEIMFRGDHIEWKGLLLRLKLDPDNQYESEMLSRRIKYVRIIRKPGKAKWRWYAQLSVEGLPAIKRNDETGEPVHPIGRGAVGIDIGPQTIAYVSQTEVALKELADRVQNIEHEKRLIQRKLDRSRRATNPANYADNGTIKRGVKLTRNKSKRYLKLQMELSFLQHKQAEIRKQQHINLANHLLSLGDCFYVEDMAWSSLARKAKETAVSEKTGKYKRKKRFGKSIANKAPASLISILDQKCTSLGLLGVIKVPTSVRASQYNHITKSYEKKTLSQRWNIMPDGRRIQRDIYSAFLLQHVTPQRDGFSDEALQQDYENFVSLHDSVIQQLRLMPKTIASMGIRRTYS

SEQ ID NO: 1960 - protein, 511 aa, unidentified
  REGION 1..511: note = Description of Unknown: uncultivated organism sequence
  REGION 1..511: note = Category: MG81 effectors
  REGION 1..511: note = Description: MG81-238 effector
MGKSKTETCCLTLPLKLEKWQEDRLAKRFEIARQIYNTLVHAELKKLNQIERSSEYQTIQDQITNLDRNDPERIKELPSLYKKRTKLLRDAGFTEYGFKSDVKYYYKYFHKNIGSSVAVHGIAPQVWAAFEKKLFKKQGKIVHYKRKGTLRSVKGGSATGKSGGTEIIFRGTYIQWKDLNLPLKRSPDNAYESEMLGYRVKYVRILRKPGKSKNRWYAQLVLEGKPVIKRNPMTGAALHPVGHGAVGLDIGPQTLAYSAADGVGLLELADQVQNIERQKALLQRKLDRSRRASNPDNYNEDGTIKRGVKLTRNQSKRYCKTQRDLAYLQHCQAETRKRQHIALANHLLTLGDRFYVEQMSWVALARRSKKTEVSEKTGKIKRKKRFGKSIANKAPAMLIEILRQKCISLGLPGVVDVPTSIKASQYNHQSKDYIKKNLSERWNDMPDGEKIQRDLYSAFLLQHCTPELNAFDQESLQQDYPRFVQYHHQVMQQLSEMPKTPSSMGIRRRTS

SEQ ID NO: 1961 - protein, 534 aa, unidentified
  REGION 1..534: note = Description of Unknown: uncultivated organism sequence
  REGION 1..534: note = Category: MG81 effectors
  REGION 1..534: note = Description: MG81-239 effector
MGWKSTGRGGTRVKRSSTDTCCLTLPLKLEKWQSDRLEKRFEIGRQIYNTIVHAELKKLRKLEKTQQYQEIEQKLENAKQEETKELWKKKRQLLDQNGLSENHFKADMKYYYPHFKDNIASSVAVHGIASQAWTAFEKVLLSKDGKMVHFKKKGELSSLRGYSQAGKSGGIEIIFRGSYVEWKGLKLPLQLSPNNEYETEMLSKRVKYIRILRKDGKTKTHWYAQLALEGKPAVKRDSISGAPKHPIGHGVVGIDIGTRTLAYSTDSEVNLLELADRVQNIEQEKRRLQRKMDRSRRAMNPGNYKPDGSIKQGVKLKWNNSKRYKRIQHQYAMIQHHQADIRKQQHNELANYLLTLGDCFFVENMSYCDLAHRANKTEISEKTGRYKRKKRFGKSIANKAPAMLITMLKQKCQSRGLEGVKEVDTHVCASQYNHQTDTCIKKALENRWNIMPDGERIQRDLYSAFLLQHCKQGLPEYNRKELKKEFGEELYRVFDREALQRDYPQFVAYHHMTIQRLSELPHTIPSMGIRRIIS

SEQ ID NO: 1962 - protein, 511 aa, unidentified
  REGION 1..511: note = Description of Unknown: uncultivated organism sequence
  REGION 1..511: note = Category: MG81 effectors
  REGION 1..511: note = Description: MG81-240 effector
MKKSNTDTCCLTLPLKLEKWQEDRLAKRFEIARQIYNTMVHAELKKLRNIENSQPYRQIQKQIEALNWKNQNDKARLKSLYNDRNKLLNTIGFSEYGFKADIKYYYKHFNDNIGSSVAVHGIAPQVWAAFEKMLFYKEGKKVHYKKKDDIHSLHGYSVTGKSGGVEIIFRKTYIEWKGLKLPLKRSPDNAYETEMLGRRVKYVRLLRKPGKRKDCWYAQLSLEGKPAIKRDPESGERRHSIGRGAVGLDIGPQTLAYSACGAADLVELADQVQNIEQMKRRLQRKLDRSRRATNPDNYADNGTIRRGVKLTHNKSNRYRRTQRELRYLQHCQAEIRKRQHIELANHLLALGDCFYVEDMAWPSLTHRAKETAISEKTGRIKRKKRFGKSVANKAPATLIGILEQKCNSLGLRGVIKVPTSLRASQYNHQSGEYTSKPLSQRWNNMPDGERIQRDLYSAFLLQHYDPKAGNFDSALLQQDYPQFVQYHHRAIQRLSTVPKTLSSMGIQRSLR

SEQ ID NO: 1963 - protein, 511 aa, unidentified
  REGION 1..511: note = Description of Unknown: uncultivated organism sequence
  REGION 1..511: note = Category: MG81 effectors
  REGION 1..511: note = Description: MG81-241 effector
MGKSSTDTCCLTLPLKLEKWQEDRLAKRFEIARQIYNTMVRAELKKLDRVKQLPEYRKNQKEIQALDWKNSADKQRLKELYGNQRKILQKQGFTEYGFKADSKDYYKHFIENIGSSVATHGIAPQVWNAFDKMLFQKDGKVVHFKRYGDVHSLKGGSVAHKSGGAEIMFRKTYIEWKGLKLPLKLSPNNAYEAEMLSYRVKYVRILRTRGKTKDRWYAQLSLEGKPAVKYDSNTGKPVHPVGRGAVGLDIGPQTLAYAGANEANLVELADQVQNIEQEKRRLQRKLDRSRRATNPDNYNENGTIRRGVKLTHNKSKRYCKLQKELSWIQHCQAETRKRQHIALANHLLSLGDCFYVEPMAWPSLTHRAKKTEVSEETGRIKRKKRFGKSVANKAPASLIGILKLKCISLGLTGVVEVPMLLRASQYNHQSKDYAKKSLSQRWNDMPDGNRIQRDLYSAFLLQHYDSRSESFDQETLERDYPQFVRLHNQTIQRLSALPKTPSSMGIRRSVS

SEQ ID NO: 1964 - protein, 530 aa, unidentified
  REGION 1..530: note = Description of Unknown: uncultivated organism sequence
  REGION 1..530: note = Category: MG81 effectors
  REGION 1..530: note = Description: MG81-242 effector
MILLAKNNNNNNTDTCVLTLPLRVEKWQEDCLLKRFEAARRIYNSLLNFELKKLRQLERTVEYRQIQSVISSAYRSNTKDSPECKDAFKRREKLISANGISENGFKSDVKFFYKHFDGLIGSNVAVHCIAVQLWAAFDKYLSGSGKEIHFKRLGDISSLKGYSVKGKSGGCEIIFRGQYVEWTRKKKKLLLPLKIDPDNEYEREMLSRRVKYVRIIKKPGKNRLRWYAQLTLEGKPALKYSAETGKPIHSVGKGNVGIDIGPQTVAYASDKEVALLELADRVTNIEHQKKKLQRKLDRSRRATNPDNYKPDGTIKCGVKLTRNKSKRYLKLQSKLAYIQHRQAEIRKLQHTCLANHMLTLGDRFFVEKMNWPGLAHRAKETSISEKTGRYKRKKRFGKSLANKAPAMFISILKRKCETLGLPGVVEVDTYSLKASQYNHLSDTYEKKSLSERWNYMPISDGSDSSKTKRIQRDLYSAFLLQHTIPHPCSFDKKALRIDYPNFVTMHDAEIHRLESLPKTITSMGVRRSHS

SEQ ID NO: 1965 - protein, 554 aa, unidentified
  REGION 1..554: note = Description of Unknown: uncultivated organism sequence
  REGION 1..554: note = Category: MG81 effectors
  REGION 1..554: note = Description: MG81-243 effector
MDNEEKKEDGATCCLTLPLKLEKWQSDHLEKRFEIARQLYNTLVHAELKRIHRIERMPEYREIERLIEATTDKKEKWALKNQKKQFLRKNGINRNTFTTDMKRLYKHFNDNIGSNVAQHGIVSQVLTAFEKVYIENQSGEVHFKKPGDLRSVQGYSQKKSGGVEIMFREGKIIWTQQENDDRKKSPKYQQRKKRQNYKGVKGIAREFPVVFSKNNPYEAEMLTKHVKFVRILRKDGKTKPHWYAQLVLEGRPVTKYDPISGAPKHPVGHGVVGIDIGTRTLAYSNDKEVNLLELADRVQNIEQEKRRLQRKMDRSRRAMNPENYNSDGTFKRGVKLTRNKSKRYRRIQHQLAMIQHHQADIRKQQHNELANYLLTLGDCFFVENMSYCDLVHRANKTEISEKTGRYKRKKRFGKSIANKAPAMLITMLKQKCQSRGLKGVKEVDTHVRASQYNHQTDTCIEKALENRWNVMPDGERIQRDLYSAFLLQHCKQGLPEYNRKELKKEFGEELYRVFDREALQRDYPQFVAYHHMTIQRLSELPHTIPSMGIRRIIS

SEQ ID NO: 1966 - protein, 522 aa, unidentified
  REGION 1..522: note = Description of Unknown: uncultivated organism sequence
  REGION 1..522: note = Category: MG81 effectors
  REGION 1..522: note = Description: MG81-244 effector
MKRSSTDTCCLTLPLKLEKWQSDRLEKRFEIGRQIYNTIVHAELKKLRKLERTQQYQEIEQKLENAKQEETKELWKKKRQLLDQNGLSENHFKADMKYYYPHFKDNIASSVAVHGIASQAWTAFEKVLLSKDGKMVHFKKKGELSSLRGYSQAGKSGGIEIIFRGSYVEWKGLKLPLQLSPNNEYETEMLSKRVKYVRILRKDGKTKTHWYAQLALEGKPAVKRDSISGAPKHPVGHGVVGIDIGTRTLAYSADSKVDLIELADRVQNIEQEKMLLQRKLDRSRRATNPENYKPDGSIKQGVKLTWNNSKRYKRIQHQYAMIQHHQADIRKQQHNELANYLLTLGDCFFVEDMDYRALTRKAKKTEISEKTGRYKRKKRFGKSIANKAPSMLIALLDQKCKSLNLEGVKKVDTAVKASQYNHQTDECKAKELKERWNIMPDGERIQRDLYSAFLLQHCRRDLPEYNRKKLQEAFGNELYRVFDREALQRDYPKFVEYHRKTIQRLSALPKTIASMGIRRIIS

SEQ ID NO: 1967 - protein, 495 aa, unidentified
  REGION 1..495: note = Description of Unknown: uncultivated organism sequence
  REGION 1..495: note = Category: MG81 effectors
  REGION 1..495: note = Description: MG81-245 effector
MSKTDGDRCILTLPLHTEPWQEQIIETRFGIMEHLKNSLIAMEMRKLKNLRRTKTFRDIEKRITETPKEERKALNMQRTAMLRDAGFSEFDFINDITPMQKHFADHIAAQIAHRSASDIWRAFESYLYSSGRDVHFQKRGTLDSVACKKIGNGMNYRNDTFEWSGGRTPNARKLYIPVEKPNTEYEKQMLRKEIKNLRIVRKWMKTRFKYYLQLTLVGQPYQKERRIGNGRVGIDIGTRTIAIASDAAVRLLELADQVDGNHAKKCEIQRRMDASKRATNPENYNADGTIRRPVRGRKMTWHFSNNYMKMQSRVRELERKNADIRKYQHNCLANETLALGTDIFVEPMAYKGLQRRAKETKTDENGRYLKKKRFGKSLANKAPSMFLTILDNKLKCHGKQLLKVDIAQFRASQFDHTNGTYRKKLLSERFAELSNGDRIQRDMYSAFLLMNSNDDLTGPDPERCAATYERFKELHEKETVRIRNKQGRRIASFGI

SEQ ID NO: 1968 - protein, 536 aa, unidentified
  REGION 1..536: note = Description of Unknown: uncultivated organism sequence
  REGION 1..536: note = Category: MG81 effectors
  REGION 1..536: note = Description: MG81-246 effector
MNNEEKEKDGATCCLTLPLKLEKWQSDHLEKRFEIARQLYNTLVHAELKRIHRIERMPEYREIERLIEATTDKKEKWALKNQKKQFLRKNGINRNTFTMDMKRLYKHFNDNIGSNVAQHGIVSQVLTAFEKVYIENQSGEVHFKKPGDLRSVQGYSQKKSGGVEIMFREGKIIWNQQGNNDRKGVAREFPLKLSPDNSYEAEMLKKHVKFVRILRKEGKTKPHWYAQLVLEGKPAIKRDPASGAPKHPVGHGVVGIDIGTRTLAYSADSKVDLIELADRVQNIEQEKLLLQRKLDRSRRATNPENYKPDGTIKKGVKLTWNNSKRYKRIQHQYAMIQHHQADIRKQQHNELANYLLTLGDCFFVEDMDYRALTRKAKKTEISEKTGRYKRKKRFGKSIANKAPSMLIALLDQKCKSLNLEGVKKVDTAVKASQYNHQTDECKAKELKERWNIMPDGERIQRDLYSAFLLQHCRRDLPEYNRKKLQETFGNELYRIFDREALQRDYPKFVEYHRETIQRLSALPKTIASMGIRRSIS

SEQ ID NO: 1969 - protein, 512 aa, unidentified
  REGION 1..512: note = Description of Unknown: uncultivated organism sequence
  REGION 1..512: note = Category: MG81 effectors
  REGION 1..512: note = Description: MG81-247 effector
MPTKQKEGGNRCVLTLPLLTEPWQEHIIEKRFKIIEHLKNQLISIELRKLKNLQRTKAYKNLIKQIESVPKSERTALYKERNKMLKDAGFSQYTFMDDMAGKKSLMQKHFESHINVQIAHKAAIDVWSSFEKFLFGSGQMIHYQKRGTLSSVASKSPKTGMFYYSDENIFKWSGGGTKPKGGIILCLRVASVKTNYEKEMVANNEIKYYRVVRKWMKTKYKYYLQITFAGKPADKHREISTGRVGIDIGTQTIAIASDKSVKLLELADKVNKNHIKKCELQRKLDRSRRYTNPDNFNPDGTVKRGTKGHKLKWNKSKHYLEIAGKIRELERKNADIRKYQHTCLANDILAMGNQIYIEPMNYKGLQKRAKETQVDEKGRYKKKKRFGKSLANKAPAMFVRILKTKAEQHGGEVYEVDIMSYRASQCDHTTGEYTKHGLNDRWRILGNGDKVQRDLYSAFLIKNSNKTHDEIDLDKCSKTYDNFKKLHDKEIENIRNEVKLRERKNISSYGIA

SEQ ID NO: 1970 - protein, 512 aa, unidentified
  REGION 1..512: note = Description of Unknown: uncultivated organism sequence
  REGION 1..512: note = Category: MG81 effectors
  REGION 1..512: note = Description: MG81-248 effector
MPAKQKEGGNRCVLTLPLLTEPWQEHIIEKRFKIIEHLKNQLISIELRKLKNLQRTKAYKNLIKQIESVPKSERTALYKERNKMLKDAGFSQYTFMDDMAGKKSLMQKHFESHINVQIAHKAAIDVWSSFEKFLFGTGQIVHYQKRGTLSSVASKSPKTGMFYYSDENIFKWSGGGTKPKGGIILCLRVASVKTNYEKEMVANNEIKYYRVVRKWMKTKYKYYLQITFAGKPADKHREISTGRVGIDIGTQTIAIASDKSVKLLELADKVNKNHIKKCELQRKLDRSRRYTNPDNFNPDGTVKRGTKGHKLKWNKSKHYIEIAGKIRELERKNADIRKYQHTCLANDILAMGNQIYIEPMNYKGLQKRAKETQVDEKGRYKKKKRFGKSLANKAPSMFVTILKTKAEQHGGEVYEVDIMSYRASQCDHTTGEYTKHGLNDRWRILGNGDKVQRDLYSAFLIKNSNKTHDEIDLDKCSKTYDNFKKLHDKEIENIRNEVILRKRRNISSYGIA

SEQ ID NO: 1971 - protein, 501 aa, unidentified
  REGION 1..501: note = Description of Unknown: uncultivated organism sequence
  REGION 1..501: note = Category: MG81 effectors
  REGION 1..501: note = Description: MG81-249 effector
MNEGDGMPKEDKESCCVLQLRLYPEPWQVQIIETRFKVLEHLKNSLIALELRKLRNLERTRAYREIQEQIKLADDKSKIKLYAKRRKLLKDAGFSEFVFKDDITPMQKHFAAHIATHVAHRAASEVWRAFDKFLFGNGKMVHYVRRGTLRSASNQKAGTTMTLENGYFKWNGGRDQNSIAINIRVAKPTTYYEKEMLQKKAKYFRIVRKWGKIGYKYYLQITLAGLPAVKPRLIANEKNVGIDIGPSSIAIVSDKKVELRALADKVQNNHIEKCSLQRSMDRSRRNLNPQNYNEDGTIRRGIRLNWTFSKHYIEMRGKVRMLERKNVDIRKYQHTCLANEVISLGTDVYIEQMSFKGLQRRAKETTYREDGRPKRKKRFGKSIANRAPAMFVEILGRKLTTIVGTELNKVDTFKFRASQYDHTNGSYKKKLLKERWAQLSNGDRIQRDLYSAFLLKNSNADLNSTNVEQCNATYDVFKIMHDDCITKLKSEKKSCLPSFGV

SEQ ID NO: 1972 - protein, 511 aa, unidentified
  REGION 1..511: note = Description of Unknown: uncultivated organism sequence
  REGION 1..511: note = Category: MG81 effectors
  REGION 1..511: note = Description: MG81-250 effector
MAKCSTDTCCLTLPLRLEKWQEDRLAKRFEIARQIYNTMVRAELKKLRAIEQSEPYKANQEKIQALDWKTQADKQALKALYKERDKLLRNGGFSEYGFKSDIKNYYKHFNNNIGSSVAVHGVAPQVWTAFEKMLFKKEGKKVHFKKKGDIRSLRGYSVTGKSGGVEIIFRETYIEWKGLKLPLKLSPDNIYETQMLSYRVKYVRLLRKPGKRKDRWYAQLSLEGKPVIKYNPKTGEVRHPIGKGAVGLDIGPQTLAYSAATGADLVELANQVQNVEQEKRRLQRKLDRSRRATNPGNYADDGTIRRGIALTHNKSKRYLRTQQELKYLQHQQAEIRKRQHTELANHLLSLGDCFYVEKMVWTSLTHRAKETEISEKTGKIKRKKRFGKSVANKAPATLIGILQRKSAALGIPGVIEVPTSVKASQYNHQSGTYTPKPLSQRWNNMPDGERIQRDLYSAFLLQHYDPQTNTFDANSLHQDYPQFVQYHHDAVLRLYAMPKTPSSMGIKRSLR

SEQ ID NO: 1973 - protein, 423 aa, unidentified
  REGION 1..423: note = Description of Unknown: uncultivated organism sequence
  REGION 1..423: note = Category: MG81 effectors
  REGION 1..423: note = Description: MG81-251 effector
MKYYYPHFKDNIASSVAVHGIASQAWTAFEKVLLSKDGKMVHFKKKGELSSLRGYSQAGKSGGIEIIFRGSYVEWKGLKLSSNNDYETEMLSRRVKYVRILRQDGKTKPHWYAQLVLEGKPAVKRDPISGAPKHPIGHGAVGIDIGTRTLAYSADSKVDLIELADRVQNIEQEKLLLQRKLDRSRRATNPENYKPDGTIKKGVKLTRNKSKRYRKIQHQLAMLQHRQANIRKRQHNELANYLLTLGDCFFVEDMDYRALTRKAKKTEISEKTGRYKRKKRFGKSIANKAPSMLIALLDQKCKSLNLEGVKKVDTAVKASQYNHQTDECKAKELKERWNIMPDGERIQRDLYSAFLLQHCRRDLPEYNRKKLQEAFGNELYRVFDREALQRDYPKFVEYHRKTIQRLSALPKTIASMGIRRSIS

SEQ ID NO: 1974 - protein, 522 aa, unidentified
  REGION 1..522: note = Description of Unknown: uncultivated organism sequence
  REGION 1..522: note = Category: MG81 effectors
  REGION 1..522: note = Description: MG81-252 effector
MKKSSTDTCCLTLPLKLEKWQSDRLEKRFEIGRQIYNTIVHAELKKLRKLERTQQYQEIEQKLENAKQEETKELWKKKRQLLDQNGLSENHFKADMKYYYPHFKDNIASSVAVHGIASQAWTAFEKVLLSKDGKMVHFKKKGELSSLRGYSQAGKSGGIEIIFRGSYVEWKGLKLPLQLSPNNEYETEMLSKRVKYVRILRKDGKTKTHWYAQLVLEGKPAIKRDPASGAPKHPVGHGAVGIDIGTRTLAYSNDKEVNLLELADRVQNIEQEKRRLQRKMDRSRRAMNPENYNSDGTFKRGVKLTRNKSKRYRRIQHQLAMIQHHQADIRKQQHNELANYLLTLGDCFFVENMSYCDLVHRANKTEISEKTGRYKRKKRFGKSIANKAPAMLITMLKQKCQSRGLKGVKEVDTHVRASQYNHQTDTCIEKALENRWNVMPDGERIQRDLYSAFLLQHCKQGLPEYNRKELKKEFGEELYRVFDREALQRDYPQFVAYHHMTIQRLSELPHTIPSMGIRRIIS

SEQ ID NO: 1975 - protein, 427 aa, unidentified
  REGION 1..427: note = Description of Unknown: uncultivated organism sequence
  REGION 1..427: note = Category: MG81 effectors
  REGION 1..427: note = Description: MG81-253 effector
MKYYYQHFKENIGSSVAVHGIASQAWTAFEKVLFSKDGKMVHFKKKGELSSLRGYSQAGKSGGVEIIFRGSYVEWKGLKLPLKLSPDNDYETEMLSKRVKYVRILRQDGKTKPHWYAQLVLEGKPAIKRDPASGAPKHPVGHGVVGIDIGTRTLAYSADSKVDLIELADRVQNIEQEKLLLQRKLDRSRRATNPENYKPDGTIKTGVKLTRNKSKRYRKIQHQLAMLQHRQADIRKRQHNELANYLLTLGDCFFVEDMDYRALTRKAKKTEISEKTGRYKCKKRFGKSIANKAPSMLIALLDQKCKSLNLEGVKKVDTAVKASQYNHQTDECKAKELKERWNIMPDGERIQRDLYSAFLLQHCRRDLPEYNRKELQKEFGEELYRVFDREALQRDYPQFVAYHHMTIQRLSELPHTIPSMGIRRIIS

SEQ ID NO: 1976 - protein, 534 aa, unidentified
  REGION 1..534: note = Description of Unknown: uncultivated organism sequence
  REGION 1..534: note = Category: MG81 effectors
  REGION 1..534: note = Description: MG81-254 effector
MGWKSKGRGGKRVKRSSTDTCCLTLPLKLEKWQSDRLEKRFEIGRQIYNTIVHAELKKLRKLERTQQYQEIEQKLENAKQEETKELWKKKRQLLDQNGLSEDHFKADMKYYYPHFKDNIASNVAVHGIASQAWTAFEKVLFSKDGKMVHFKKKGELSSLRGYSRAGKSGGVEIIFRGSYVEWKGLKLPLKLSPDNDYETEMLSKRVKYVRILRKDGKTKTHWYAQLALEGKPAVKRDSISGAPKHPVGHGVVGIDIGTRTLAYSTDSEVNLLELADRVQNIEQEKRRLQRKMDRSRRAMNPGNYKPDGSIKQGVKLTWNNSKRYKRIQHQYAMIQHHQADIRKQQHNELANYLLTLGDCFFVENMSYCDLAHRANKTEISEKTGRYKRKKRFGKSIANKAPAMLITMLKQKCQSRGLEGVKEVDTHVCASQYNHQTDTCIKKALENRWNVMPDGERIQRDLYSAFLLQHCRRDLPEYNREELQKEFGEELYRVFDREALQRDYPQFVAYHHMTIQRLSELPHTIPSMGIRRIIS

SEQ ID NO: 1977 - protein, 526 aa, unidentified
  REGION 1..526: note = Description of Unknown: uncultivated organism sequence
  REGION 1..526: note = Category: MG81 effectors
  REGION 1..526: note = Description: MG81-255 effector
MNNEEKEKDGATCCLTLPLKLEKWQSDRLEKRFEIGRQIYNTIVHAELKKLRKLERTQQYQEIEQKLENAKQEETKELWKKKRQLLDQNGLSENHFKADMKHYYPHFKDNIASSVAVHGIASQAWTAFEKVLLSKDGKMVHFKKKGELSSLRGYSQAGKSGGIEIIFRGSYVEWKGLKLPLKLSPDNDYETEMLSKRVKYVRILRKDGKTKTHWYAQLALEGKPAVKRDSISGAPKHPVGHGVVGIDIGTRTLAYSTDKEVNLLELADRVQNIEQEKRRLQRKMDRSRRAMNPGNYKPDGSIKQGVKLTWNNFKRYKRIQHQYAMIQHHQADIRKQQHNELANYLLTLGDCFFVENMSYCDLAHRANKTEISEKTGRYKRKKRFGKSIANKAPAMLITMLKQKCQSRGLEGVKEVDTHVCASQYNHQTDTCIKKALENRWNIMPDGERIQRDLYSAFLLQHCRRDLPEYNRKELQKEFGEELYRVFDREALQRDYPQFVAYHHMTIQRLSELPHTIPSMGIRRIIS

SEQ ID NO: 1978 - protein, 538 aa, unidentified
  REGION 1..538: note = Description of Unknown: uncultivated organism sequence
  REGION 1..538: note = Category: MG81 effectors
  REGION 1..538: note = Description: MG81-256 effector
MDNEEKEKDGATCCLMLPLKLEKWQSDHLEKRFEIARQLYNTLVHAELKKKCQVERMPEYQEIMKMIDAASNQKEKWALEKKRKAFLEENGFSRNAFKADMEKYYKHFNDNIGANVALHGITAQVWIAFDKVFVDNYKQKGKVHFKKPGELCSVQGYSQKKSGGKEIMFREDRIIWNQQGNRDRKKVKREFLLKLSPDNPYEAEMLKRHVKFVRILRKDGKTKPHWYAQLVLEGKPAVKRDPASGAPKHPIGHGVVGIDIGTRTLAYSTDSEVNLLELADRVQNIEQEKRRLQRKMDRSRRAMNPGNYKPDGSIKQGVKLTWNNSKRYKRIQHQYAMIQHHQADIRKQQHNELANYLLTLGDCFFVENMSYCDLAHRANKTEISEKTGRYKRKKRFGKSIANKAPAMLITMLKQKCQSRGLEGVKEVDTHVCASQYNHQTDTCIKKALENRWNIMPDGERIQRDLYSAFLLQHCRRDLPEYNRKELQKEFGEELYRVFDREALQRDYPQFVAYHHMTIQRLSELPHTIPSMGIRRIIS

SEQ ID NO: 1979 - protein, 511 aa, unidentified
  REGION 1..511: note = Description of Unknown: uncultivated organism sequence
  REGION 1..511: note = Category: MG81 effectors
  REGION 1..511: note = Description: MG81-257 effector
MGKSSTDTCCLTLPLKLEKWQEDRLAKRFEIARQIYNTMVRAELKRLRQVEQSPQYRSNKKAIQALDWKNTADKPKLKTLYRERDKLLKGGGFTEYGFKSDIKNFYKHFAENIGSSVAVHGIAPQVWAAFERVLFKKEGKKVHFKKTGDIRSLRGYSVTGKSGGVEIIFRGSYIEWKGLNLPLKLSPDNAYETEMLSYRVKYVRILRKPGKTRDRWYAQLSLEGKPAIKRNPASGNPVHPVGQGAVGLDIGPQTLAYAAEKEANLVELADRVQNIEREKHLLQRKMDRSRRAANPDNYAENGTIRRGVKLTHNKSKRYLRLQRELCYLQHCQAETRKRQHTELANHLLSLGSCFYVEDMAWPSLTHRAKKTEISDKTGRIKRKKRFGKSIANKAPAALINILRTKCVSLGIPGVVEVPTSLKASQYNHQSKEYTPKPLSQRWNDMPDGSRIQRDLYSAFLLQHYDPQSGNFDQASLEADYPQFVQLHNQSIQRLLTVPKTPSSMGIRRSVS

SEQ ID NO: 1980 - protein, 538 aa, unidentified
  REGION 1..538: note = Description of Unknown: uncultivated organism sequence
  REGION 1..538: note = Category: MG81 effectors
  REGION 1..538: note = Description: MG81-258 effector
MNNEEKEKEGATCCLTLPLKLEKWQSDHLEKRFEIAQQLYNTLVHAELKKKCQVERMPEYQEIMKMIDTASNQKEKWALEKKRKAFLEENGFSRNAFKADMEKYYKHFNDNIGANVALHGITAQVWIAFDKVFVDNYKQKGKVHFKKPGELCSVQGYSQKKSGGKEIMFREDRIIWNQQGNRDRKKVKREFLLKLSPDNPYEAEMLKRHVKFVRILCKDGKTKPHWYAQLVLEGKPAVKRDPISSAPKHPVGHGVVGIDIGTRTLAYSTDKEVNLLELADHVQNIEQEKRRLQRKMDRSRRATNPENYNPDGTFKRGVKLTRNKSKRYRRIQHQLAMIQHHQADIRKQQHNELANYLLTLGDCFFVENMSYCDLVHRANKTEISEKTGRYKRKKRFGKSIANKAPAMLITMLKQKCQSRGLKGVKEVDTHVRASQYNHQTDTCIEKALENRWNVMPDGERIQRDLYSAFLLQHCKQGLPEYNRKELKKEFGEELYRVFDREALQRDYPQFVAYHHMTIQRLSELPHTIPSMGIRRIIS

SEQ ID NO: 1981 - protein, 533 aa, unidentified
  REGION 1..533: note = Description of Unknown: uncultivated organism sequence
  REGION 1..533: note = Category: MG81 effectors
  REGION 1..533: note = Description: MG81-259 effector
MILLANNNNNNNNNNTDTCVLTLPLRVEKWQEDCLLKRFEAARRIYNSLLNFELKKLRQLERTVEYRQIQSVISSAYRSNTKDSPECKDAFKRREKLISANGISEYGFKSDVKFFYKHFDGLIGSSVAVHCIAVQLWAAFDKYLRGSGKEIHFKRLGEISSLKGYSVKGKSGGLEIIFRGQYIEWTRKKKKLLLPLKIDPDNEYEREMLSRRVKYVRIIKKPGKNRLRWYAQLTLEGKPALKYSAETGKPIHSVGKGNVGIDIGPQTVAYASDKEVALLELADRVTNIEHQKKKLQRKLDRSRRATNPDNYKPDGTIKRGVKLTRNKSKRYLKLQSKLAYIQHRQAEIRKLQHTCLANHMLTLGDRFFVEKMNWPGLAHRAKETSISEKTGRYKRKKRFGKSLANKAPAMFISILKRKCETLGLPGVVEVDTYNLKASQYNHLSDTYEKKSLSERWNYMPISDGSDSSKTKRIQRDLYSAFLLQHTIPQPCSFDKEALRIDYPNFVTMHDAEIHRLESLPKTVTSMGVRRSHS

SEQ ID NO: 1982 - protein, 414 aa, unidentified
  REGION 1..414: note = Description of Unknown: uncultivated organism sequence
  REGION 1..414: note = Category: MG81 effectors
  REGION 1..414: note = Description: MG81-260 effector
MWIAFDKVFVDNYKQKGKVHFKKPGELCSVQGYSQKKSGGKEIMFREDRIIWNQQGNRDRKKVKREFLLKLSPDNPYEAEMLKRHVKFVRILRKDGKTKPHWYAQLVLEGKPAVKRDPASGAPKHPIGHGVVGIDIGTRTLAYSTDKEVNLLELADRVQNIEQEKRRLQRKMDRSRRATNPENYNPDGTFKRGVKLTRNKSKRYKRIQHQYAMIQHHQADIRKQQHNELANYLLTLGDCFFVENMSYCDLVHRANKTEISEKTGRYKRKKRFGKSIANKAPAMLITMLKQKCQSRGLEGVKEVDTHVCASQYNHQTDTCIKKALENRWNIMPDGERIQRDLYSAFLLQHCRRDLPEYNRKELQKEFGEELYRVFDREALQRDYPQFVAYHHMTIQRLSELPHTIPSMGIRRIIS

SEQ ID NO: 1983 - protein, 534 aa, unidentified
  REGION 1..534: note = Description of Unknown: uncultivated organism sequence
  REGION 1..534: note = Category: MG81 effectors
  REGION 1..534: note = Description: MG81-261 effector
MGWKSKGRGGTRVKKSSTDTCCLTLPLKLEKWQSDRLEKRFEIGRQIYNTVVRAELKKLHQVERTPQYREIEQKLKGAKQEEAKELWKKRTQLLSKSGFSEYGFKSDMKYYYQHFKENIGSSVAVHGIASQVWTAFEKVLFSKDGKMVHFKKKGELSSLRGYSQAGKSGGIEIIFRGSYVEWKGLKLPLKLSSNNDYETEMLSKRVKYVRILRQEGKTKPHWYAQLVLEGKPAIKRDPASGTPKHPIGHGVVGIDIGTRTLAYSTDKEVNLLELADRVQNIEQEKRRLQRKMDRSRRAMNPENYNSDGTFKRGVKLTRNKSKRYRRIQHQLAMIQHHQADIRKQQHNELANYLLTLGDCFFVENMSYCDLVHRANKTEISEKTGRYKRKKRFGKSIANKAPAMLITMLKQKCQSRGLKGVKEVDTHVRASQYNHQTDTCIEKALENRWNVMLDGERIQRDLYSAFLLQHCKQGLPEYNRKELKKEFGEELYRVFDREALQRDYPQFVAYHHMTIQRLSELPHTIPSMGIRRIIS

SEQ ID NO: 1984 - protein, 538 aa, unidentified
  REGION 1..538: note = Description of Unknown: uncultivated organism sequence
  REGION 1..538: note = Category: MG81 effectors
  REGION 1..538: note = Description: MG81-262 effector
MDNEEKEKDGATCCLTLPLKLEKWQSDHLEKRFEIARQLYNTLVHAELKKKCQVERMPEYQEIMKMIDAASNQKEKWALEKKRKAFLEENGFSRNAFKADMEKYYKHFNDNIGANVALHGITAQVWIAFDKVFVDNYKQKGKVHFKKPGELCSVQGYSQKKSGGKEIMFREDRIIWNQQGNRDRKKVKREFLLKLSPDNPYEAEMLKRHVKFVRILRKDGKTKPHWYAQLVLEGKPAVKRDPASGAPKHPIGHGVVGIDIGTRTLAYSTDKEVNLLELADHVQNIEQEKRRLQRKMDRSRRATNPENYNPDGTFKRGVKLTRNKSKRYRRIQHQLAMIQHHQADIRKQQHNELANYLLTLGDCFFVENMSYCDLVHRANKTEISEKTGRYKRKKRFGKSIANKAPTMLITMLKQKCQSRGLEGVKEVDTHVRASQYNHQTDTCIEKALENRWNVMPDGERIQRDLYSAFLLQHCKQGLPEYNRKELKKEFGEELYRVFDREALQRDYPQFVAYHHMTIQRLSELPHTIPSMGIRRIIS

SEQ ID NO: 1985 - protein, 534 aa, unidentified
  REGION 1..534: note = Description of Unknown: uncultivated organism sequence
  REGION 1..534: note = Category: MG81 effectors
  REGION 1..534: note = Description: MG81-263 effector
MGWKSTGRGGTRVKRSSTDTCCLTLPLKLEKWQSDRLEKRFEIGRQIYNTIVHAELKKLRKLERTQQYQEIEQKLENAKQEETKELWKKKRQLLDQNGLSENHFKADMKYYYPHFKDNIASSVAVHGIASQAWTAFEKVLLSKDGKMVHFKKKGELSSLRGYSQAGKSGGIEIIFRGSYVEWKGLKLPLKLSPNNEYETEMLSKRVKYVRILRKDGKTKTHWYAQLALEGKPAVKRDSISGAPKHPVGHGVVGIDIGTRTLAYSTDSEVNLLELADRVQNIEQEKRRLQRKMDRSRRAMNPGNYKPDGSIKQGVKLTWNNSKRYKRIQHQYAMIQHHQADIRKQQHNELANYLLTLGDCFFVENMSYCDLAHRANKTEISEKTGRYKRKKRFGKSIANKAPAMLITMLKQKCQSRGLEGVKEVDTHVCASQYNHQTDTCIKKALENRWNVMPDGERIQRDLYSAFLLQHCRRDLPEYNRKELQKEFGEELYRVFDREALQRDYPRFVAYHHMTIQRLSELPHTIPSMGIRRIIS

SEQ ID NO: 1986 - protein, 550 aa, unidentified
  REGION 1..550: note = Description of Unknown: uncultivated organism sequence
  REGION 1..550: note = Category: MG81 effectors
  REGION 1..550: note = Description: MG81-264 effector
MGWKSKGRGGTLVDNEEKKEDGATCCLTLPLKLEKWQSDHLEKRFEIARQLYNTLVHAELKKKCQVERMPEYQEIMKMIDTASNQKEKWALEKKRKAFLEENGFSRNAFKADMEKYYKHFNDNIGANVALHGITAQVWIAFDKVFVDNYKQKGKVHFKKPGELCSVQGYSQKKSGGKEIMFREDRIIWNQQGNCDRKKVKREFLLKLSPDNPYEAEMLKRHVKFVRILRKDGKTKPHWYAQLVLEGKPAVKRDPASGAPKHPIGHGVVGIDIGTRTLAYSTDKEVNLLELADRVQNIEQEKRRLQRKMDRSRRATNPENYNPDGTFKRGVKLTRNKSKRYRRIQHQLAMIQHHQADIRKQQHNELANYLLTLGDCFFVENMSYCDLVHRANKTEISEKTGRYKRKKRFGKSIANKAPAMLITMLKQKCQSRGLKGVKEVDTHVRASQYNHQTDTCIEKALENRWNVMPDGERIQRDLYSAFLLQHCKQGLPEYNRKELKKEFGEELYRVFDREALQRDYPQFVAYHHMTIQRLSELPHTIPSMGIRRIIS

SEQ ID NO: 1987 - protein, 482 aa, unidentified
  REGION 1..482: note = Description of Unknown: uncultivated organism sequence
  REGION 1..482: note = Category: MG81 effectors
  REGION 1..482: note = Description: MG81-265 effector
MPEYQEIMKMIDTASNQKEKWALEKKRKAFLEENGFSRNAFKADMEKYYKHFNDNIGANVALHGITAQVWIAFDKVFVDNYKQKGKVHFKKPGELCSVQGYSQKKSGGKEIMFREDRIIWNQQGNRDRKKVKREFLLKLSPDNPYEAEMLKRHVKFVRILRKDGKTKPHWYAQLVLEGKPAVKRDPASGAPKHPIGHGVVGIDIGTRTLAYSTDKEVNLLELADRVQNIEQEKRRLQRKMDRSRRATNPENYNPDGTFKRGVKLTRNKSKRYRRIQHQLAMIQHHQADIRKQQHNELANYLLTLGDCFFVENMSYCDLVHRANKTEISEKTGRYKRKKRFGKSIANKAPAMLITMLKQKCQSRGLKGVKEVDTHVRASQYNHQTDTCIEKALENRWNVMPDGERIQRDLYPAFLLQHCKQGLPEYNRKELKKEFGEELYRVFDREALQRDYPQFVAYHHMTIQRLSELPHTIPSMGIRRIIS

SEQ ID NO: 1988 - protein, 512 aa, unidentified
  REGION 1..512: note = Description of Unknown: uncultivated organism sequence
  REGION 1..512: note = Category: MG81 effectors
  REGION 1..512: note = Description: MG81-266 effector
MPTKQKEDSNRCVLTLPLLTEPWQEHKKKKRFKIIEHLKNQLISIELRKLKKLQRTKAYKNLIKQIESVPKSERTALYKERNKMLKDAGFSQYTFMDDMAGKKSLMQKHFESHINVQIAHKAAIDVWSSFEKFLFGTGQIVHYQKRGTLSSVASKSPKTGMFYYPDENIFKWSGGGTKPKGGIILCLRVASVKTNYEKEMVANNEIKYYRVVRKWMKTKYKYYLQITFAGKPADKHREISTGRVGIDIGTQTIAIASDKSVKLLELADKVNKNHIKKCELQRKLDRSRRYTNPDNFNPDGTVKRGTKGHKLKWNKSKHYLEIAGKIRELERKNADIRKYQHTCLANDILAMGNQIYIEPMNYKGLQKRAKETQVDEKGRYKKKKRFGKSLANKAPAMFVTILKTKAEQHGGEVYEVDIMSYRASQCDHTTGEYTKHGLNDRWRILGNGDKVQRDLYSAFLIKNSNKTHDEIDLDKCSKTYDSFKKLHDKEIENIRNEVILRKRRNISSYGIA

SEQ ID NO: 1989 - protein, 534 aa, unidentified
  REGION 1..534: note = Description of Unknown: uncultivated organism sequence
  REGION 1..534: note = Category: MG81 effectors
  REGION 1..534: note = Description: MG81-267 effector
MGWKSKGRGGKRVKKSSTDTCCLTLPLKLEKWQSDRLEKRFEIGRQIYNTVVRAELKKLHQVERTPQYREIEQKLKEAKQEEAKELWKKRTQLLSKSGFSEYGFKSDMKYYYQHFKENIGSSVAVHGIASQVWTAFEKVLFSKDGKMVHFKKKGELSSLRGYSQAGKSGGIEIIFRGSYVEWKGLKLPLKLSSNNDYETEMLSKRVKYVRILRKEGKTKPHWYAQLVLEGKPAIKRDPASGAPKHPVGHGVVGIDIGTRTLAYSADSKVDLIELADRVQNIELEKMLLQRKLDRSRRATNPENYKPDGTIKKGVKLTRNKSKRYRKIQHQLAMLQHRQADIRKRQHNELANYLLTLGDCFFVEDMDYRALTRKAKKTEISEKTGRYKRKKRFGKSIANKAPSMLIALLDQKCKSLNLEGVKKVDTAVKASQYNHQTDECKAKELKERWNIMPDGERIQRDLYSAFLLQHCRRDLPEYNRKKLQEAFGNELYRVFDREALQRDYPKFVEYHRKTIQRLSALPKTIASMGIRRIIS

SEQ ID NO: 1990 - protein, 521 aa, unidentified
  REGION 1..521: note = Description of Unknown: uncultivated organism sequence
  REGION 1..521: note = Category: MG81 effectors
  REGION 1..521: note = Description: MG81-268 effector
MMVMWKGGIPVGKSSTDTCCLTLPLKLEKWQEDRLAKRFEIARQIYNTMVRAELKKLDRVKQLPEYRKNQKEIQALDWKNSADKQRLKELYGNQRKILQKQGFTEYGFKADSKDYYKHFIENIGSSVATHGIAPQVWNAFDKMLFQKDGKVVHFKRYGDVHSLKGGSVAHKSGGAEIMFRKTYIEWKGLKLPLKLSPNNAYEAEMLSYRVKYVRILRTRGKTKDRWYAQLSLEGKPAVKYDSNTGKPVHPVGRGAVGLDIGPQTLAYAGANEANLVELADQVQNIEQEKRRLQRKLDRSRRATNPDNYNENGTIRRGVKLTHNKSKRYCKLQKELSWIQHCQAETRKRQHIALANHLLSLGDCFYVEPMAWPSLTHRAKKTEVSEETGRIKRKKRFGKSVANKAPASLIGILKLKCISLGLTGVVEVPMLLRASQYNHQSKDYAKKSLSQRWNDMPDGNRIQRDLYSAFLLQHYDSRSESFDQETLERDYPQFVRLHNQTIQRLSALPKTPSSMGIRRSVS

SEQ ID NO: 1991 - protein, 529 aa, unidentified
  REGION 1..529: note = Description of Unknown: uncultivated organism sequence
  REGION 1..529: note = Category: MG81 effectors
  REGION 1..529: note = Description: MG81-269 effector
MAKNNNNNNNNTDTCVLTLPLRVEKWQEDCLLKRFEAARRIYNSLLNFELKKLRQLERTVEYRQIQSVISSAYRSNTKDSPECKDAFKRREKLISANGISENGFKSDVKFFYKHFDGLIGSNVAVHCIAVQLWAAFDKYLSGSGKEIHFKRLGDISSLKGYSVKGKSGGCEIIFRGQYVEWTRKKKKLLLPLKIDPDNEYEREMLSRRVKYVRIIKKPGKNRLRWYAQLTLEGKPALKYSAETGKPIHSVGKGNVGIDIGPQTVAYASDKEVALLELADRVTNIEHQKKKLQRKLDRSRRATNPDNYKPDGTIKCGVKLTRNKSKRYLKLQSKLAYIQHRQAEIRKLQHTCLANHMLTLGDRFFVEKMNWPGLAHRAKETSISEKTGRYKRKKRFGKSLANKAPAMFISILKRKCETLGLPGVVEVDTFRLRASQYNHLSDTYEKKSLSERWNYMPISDGSDSSKTKRIQRDLYSAFLLQHTIPQPCSFDKEALRIDYPNFVIMHDAEIHRLESLPKTITSMGVRRSHS

SEQ ID NO: 1992 - protein, 512 aa, unidentified
  REGION 1..512: note = Description of Unknown: uncultivated organism sequence
  REGION 1..512: note = Category: MG81 effectors
  REGION 1..512: note = Description: MG81-270 effector
MKKSSTDTCCLTLALKLEKWQEDRLAKRFEIARQLYNTLVHAELKRLVQIKRTAEYLENEQKIRALDRNNPADRAKLQELYKEQRKSLKTAGFTDYSFTTDMGKYYKHFRDNIGSSVAVHGIAPQVWAAFDKVLFKKGGKKVHYKRPGEVNSVQGYSRTGKSGGREIMFRGPYIEWKGLKLPLKLSPDNAYETDMLQRRVKLVRLVRRPGKRRDRWYAQLVLEGKPAIKADPVTGKAVHPIGSGPVGLDIGPQTLAYSAARVAGLVELADRVQNIEQEKRCLQRKMDRSRRAANPDNYAEDGTIRRGVKLTHNKSKRYRRSQQELKYLQHRQVEIRKLQHIQLANHLLSLGDHFYVEKMEWSSLTHRAKKTVISEKTGKPRSKKRFGKSIANKAPAMLIEILRQKCKSLGLPNVVEINPADIKASQYNHLTGEYVKKSLSRRWNEMQDGEHLQRDLYSAFLLQHYDSMSKALDLDSLARDYPAFVQYHHREIERLHALPKTPSSMGIRRSIA

SEQ ID NO: 1993 - protein, 511 aa, unidentified
  REGION 1..511: note = Description of Unknown: uncultivated organism sequence
  REGION 1..511: note = Category: MG81 effectors
  REGION 1..511: note = Description: MG81-271 effector
MKKSNTDTCCLTLPLKLEKWQEDRLAKRFEIARQIYNTMVHAELKKLRNIENSQPYRQIQKQIEALNWKNQNDKARLKSLYNDRNKLLNTIGFSEYGFKADIKYYYKHFNDNIGSSVAVHGIAPQVWAAFEKMLFHKEGKKVHYKKKDDIHSLHGYSVTGKSGGVGIIFRKTYIEWKGLKLPLKRSPDNAYETEMLGRRVKYVRLLRKPGKRKDCWYAQLSLEGKPAIKRDPESGKRRHSIGRGAVGLDIGPQTLAYSACGAADLVELADQVQNIEQMKRRLQRKLDRSRRATNPDNYADNGTIRRGVKLTHNKSNRYRRTQRELRYLQHCQAEIRKRQHIELANHLLALGDCFYVEDMAWPSLTHRAKETAISEKTGRIKRKKRFGKSVANKAPATLIGILEQKCNSLGLPGVVKVPTSLRASQYNHQSGEYTSKPLSQRWNNMPDGERIQRDLYSAFLLQHYDPKAGNFDSALLQQDYPQFVQYHHRAIQRLSTVPKTLSSMGIQRSLR

SEQ ID NO: 1994 - protein, 548 aa, unidentified
  REGION 1..548: note = Description of Unknown: uncultivated organism sequence
  REGION 1..548: note = Category: MG81 effectors
  REGION 1..548: note = Description: MG81-272 effector
MGWKSKGRGGTRVNNEEKEKDGATCCLTLPLKLEKWQSDHLEKRFEIARQLYNTLVHAELKRIHRIERMPEYREIERLIEATTDKKEKWALKNQKKQFLRKNGINRNTFTMDMKRLYKHFNDNIGSNVAQHGIVSQVLTAFEKVYIENQSGEVHFKKPGDLRSVQGYSQKKSGGVEIMFREGKIIWNQQGNNDRKGVAREFPLKLSPDNSYEAEMLKKHVKFVRILRKEGKTKPHWYAQLVLEGKPAIKRDPASGAPKHPVGHGVVGIDIGTRTLAYSADSKVDLIELADRVQNIEQEKLLLQRKLDRSRRATNPENYKPDGTIKKGVKLTWNNSKRYKRIQHQYAMIQHHQADIRKQQHNELANYLLTLGDCFFVEDMDYRALTRKAKKTEISEKTGRYKRKKRFGKSIANKAPSMLIALLDQKCKSLNLEGVKKVDTAVKASQYNHQTDECKAKELKERWNIMPDGERIQRDLYSAFLLQHCRRDLPEYNRKKLQETFGNELYRIFDREALQRDYPKFVEYHRETIQRLSALPKTIASMGIRRSIS

SEQ ID NO: 1995 - protein, 1387 aa, unidentified
  REGION 1..1387: note = Description of Unknown: uncultivated organism sequence
  REGION 1..1387: note = Category: MG81 effectors
  REGION 1..1387: note = Description: MG81-273 effector
MKLTKVEKARIAVSREKKDSGRIILYTNPEDVKKTSVTTMEQQVSKRIDQANKLYQVFFKSVIPVELNKHFAEISKIAAKCRNTEEFYKKACGYSGYEWTDAKQKKRTSQISRFSYTSSGKNMYVVMDNFVKEYMVQIWQEKDFRNAAVKILCCICDGKKFASKLEKVKKESPDTLKKFIEISGKCEGNPFVDYDTSFLEKVFTLVISQMVKNCDRKSYEQDDKEKIKKSIQKEIQWLSHVQSVTERSFGREGKTYLLFKIRNPYATEERLQTVLIRMRKTLKRGRNRDIAIVLLQGLAQMNQVTFTDTVKHLYQEEEKAFCDFIDAVNRDYYRVNIVKSVRNMDVKVQPDLNDNSILKLSGLGNIKKEALSDTLLRYAASADESDQVLLDIKKLLFEYFLPENSKETSKYTTVQNLWNIPYLPKIFFDYGFENEDSDDDNECAEDIETLCDVEPQYKINQHSLKRRIRYVNYGKYLQMTKNESDRERRYWIHYIKEFVEKNYVDSGRTLSEKNCYASSMMLNCWKEIIRYLCGKYIDIGKAVFHFTNLTAMPKPKDKIIYGQLEEQYKKGISSFDYEAIKAEETLQRDIVQSVVAAAFAFSKSVIDETKMEECQETNKEDILFLSENVLGSLLKENTIKLILRFYGGESSVAQKEYFDQQEIVQEMISHLKSIRNENFHYLDGAKKDNPHKYASILWKNDEMAYQKLTKQRYYANNVGLFYRAEEIQELVQELYSQKNITEAQIPAFRTVLKRKDLPGYMEELGILFPDNTQEKSKGDFEGTLYFLMKEIYYRDFIVKDKAAAYFFKAVDQNKEQSKKEDKHTERAAENFHRYVKSLEKKYNKKEISFGTVCQYIMMEYNQQNTTKQETEIYKHFKMLISLCIRKAFGNYIKETYRFLFHPIYSKQQGEPEYLDTLELESGVKEKNYEWFTLAHFLHPVQLNHLVGDLKSYIQYREDILRRIVFAEQRVYADQQKEVQQKVKTAKEILEVLEFVREVSGRVSNEYTDYYENEEEYAEFLYQYIDFRKREGKSAFESLKYFCQNILDSGTVVDLYADTENPKVLRNIELTRMYAGSNVKIPEYEKITEDEIKMYYQEKNSVALILSRGLCRNEKEQKKVIEFNWKKKRLTLNEITDVFSLVNDLLGKMISFSYLRERDQMYLLLGFYYMALCAENKSENHLGWKGETLDKLESSDSKFDIGGGLVLYQIVSAFNFGSKLLYISEDGRWKMAGGAFPGKYGRFENDYNHRTSLSKVIRLFENESYEREIIYWRDYVDHMKYYVNQNQSIMEIYSAFYSKVLGYSAKLRKSVVFNLQAALEKHHINPECIWMTSDGKCADIKLMKNLESQKFTYKLAKREGEKTERKICMNALNENFLKTIRTSLEYKK

SEQ ID NO: 1996 - protein, 536 aa, unidentified
  REGION 1..536: note = Description of Unknown: uncultivated organism sequence
  REGION 1..536: note = Category: MG81 effectors
  REGION 1..536: note = Description: MG81-274 effector
MNNEEKEKDGATCCLTLPLKLEKWQSDHLEKRFEIARQLYNTLVHAELKRIHRIERMPEYREIERLIEATTDKKEKWALKNQKKQFLRKNGINRNTFTTDMKRLYKHFNDNIGSNVAQHGIVSQVLTAFEKVYIENQSGEVHFKKPGDLRSVQGYSQKKSGGVEIMFREGKIIWNQQGNNDRKGVAREFPLKLSPDNSYEAEMLKKHVKFVRILRKEGKTKPHWYAQLVLEGKPTVKRDPISGAPKHPVGHGVVGIDIGTRTLAYSTDSEVNLLELADRVQNIEQEKRRLQRKMDRSRRAMNPENYNSDGTFKRGVKLTRNKSKRYRRIQHQLAMIQHHQADIRKQQHNELANYLLTLGDCFFVENMSYCDLVHRANKTEISEKTGRYKRKKRFGKSIANKAPAMLITMLKQKCQSRGLEGVKEVDTHVRASQYNHQTDTCIEKALENRWNVMPDGERIQRDLYSAFLLQHCKQGLPEYDRKELKKEFGEELYRVFDREALQRDYPQFVAYHHMTIQRLSELPHTIPSMGIRRIIS

SEQ ID NO: 1997 - protein, 550 aa, unidentified
  REGION 1..550: note = Description of Unknown: uncultivated organism sequence
  REGION 1..550: note = Category: MG81 effectors
  REGION 1..550: note = Description: MG81-275 effector
MGWKSKGRGGTLVDNEEKKEDGATCCLTLPLKLEKWQSDHLEKRFEIARQLYNTLVHAELKKKCQVERMPEYQEIMKMIDTASNQKEKWALEKKRKAFLEENGFIRNAFKADMEKYYKHFNDNIGANVALHGITAQVWIAFDKVFVDNYKQKGKVHFKKPGELCSVQGYSQKKSGGKEIMFREDRIIWNQQGNRDRKKVKREFLLKLSPDNPYEAEMLKRHVKFVRILRKDGKTKPHWYAQLVLEGKPAVKRDPASGAPKHPIGHGVVGIDIGTRTLAYSTDKEVNLLELADRVQNIEQEKRRLQRKMDRSRRATNPENYNPDGTFKRGVKLTRNKSKRYKRIQHQYAMIQHHQADIRKQQHNELANYLLTLGDCFFVENMSYCDLVHRANKTEISEKTGRYKRKKRFGKSIANKAPAMLITMLKQKCQSRGLEGVKEVDTHVCASQYNHQTDTCIKKALENRWNIMPDGERIQRDLYSAFLLQHCRRDLPEYNRKELQKEFGEELYRVFDREALQRDYPQFVAYHHMTIQRLSELPHTIPSMGIRRIIS

SEQ ID NO: 1998 - protein, 511 aa, unidentified
  REGION 1..511: note = Description of Unknown: uncultivated organism sequence
  REGION 1..511: note = Category: MG81 effectors
  REGION 1..511: note = Description: MG81-276 effector
MKRSGTDTCCLTLPLRLEKWQEDRLAKRFEIARQIYNTMVRAELKKLRKMELSQPYRSIQEQIKALDWKNQNDKQQLRSLYNERDQLLKKNGFTEYGFKSDIKYYYKYFNDNIGSSVAVHGIAPQVWAAFEKMLFRKEGKKVHYKKKDDIHSLRGYSVTGKSGGVEIIFHETYIEWKGLKLPLKLSPHNAYETEMLSRRVKYVRLLRKPGKRKDRWYAQLSLEGKPAIKHNPASGELRHPVGQGAVGLDIGPQTLAYSACCAADLVELADRVQNIEQVKRLLLRKMDRSRRATNPDNYTDDGTIRRGVKLTHNKSKRYQRTQRELRYLQHCQAEMRKRQHIELANHLLTLGDRFYVEDMAWPSLTRRAKETAISEKTGKIKRKKRFGKSIANKAPAALIGILEQKCYSLGLPGVVKVPTSLKASQYNHQSGEYTPKPLSRRWNNMPDGERIQRDLYSAFLLQHYDPQTGNFDPVLLQQDYPQFVQYHHCAIQRLSAMPRTLSSMGIQRSLR

SEQ ID NO: 1999 - protein, 534 aa, unidentified
  REGION 1..534: note = Description of Unknown: uncultivated organism sequence
  REGION 1..534: note = Category: MG81 effectors
  REGION 1..534: note = Description: MG81-277 effector
MGWKSKGRGGTLVKKSSTDTCCLTLPLKLEKWQSDRLEKRFEIGRQIYNTIVHAELKKLRKLERTQQYQEIEQKLENAKQEETKELWKKKRQLLDQNGLSENHFKADMKYYYPHFKDNIASSVAVHGIASQAWTAFEKVLLSKDGKMVHFKKKGELSSLRGYSQAGKSGGIEIIFRGSYVEWKGLKLPLQLSPNNEYETEMLSKRVKYVRILRKDGKTKTHWYAQLALEGKPAVKRDSISGAPKHPVGHGVVGIDIGTRTLAYSADSKVDLIELADRVQNIEQEKMLLQRKLDRSRRATNPENYKPDGSIKQGVKLTWNNSKRYKRIQHQYAMIQHHQADIRKQQHNELANYLLTLGDCFFVEDMDYRALTRKAKKTEISEKTGRYKRKKRFGKSIANKAPSMLIALLDQKCKSLNLEGVKKVDTAVKASQYNHQTDECKAKELKERWNIMPDGERIQRDLYSAFLLQHCRRDLPEYNRKKLQETFGNELYRVFDREALQRDYPKFVEYHRETIQRLSALPKTIASMGIRRIIS

SEQ ID NO: 2000 - protein, 499 aa, unidentified
  REGION 1..499: note = Description of Unknown: uncultivated organism sequence
  REGION 1..499: note = Category: MG81 effectors
  REGION 1..499: note = Description: MG81-278 effector
MAKGKKKNQSVRCVLTLPLLTEPWQDKIIETRFHIMERIKNILISKELGKLKSLERTREWKKLKKDIEKCKEKDEEEKKILYEQRSKMIYDAGLSKNHFVVDITPIQKHFAEHIATQIAHMSASDVWRSFEKYFYGSGQRIHFVEYDKLNSIACEKIGNGMNLKDWKLVWGGGRCPNKISLTIKVRLPRNDYEREMMQKPIKYLRVVRKWMKTRYKYYLQITFEGNPVIKSRPVGNGRVGIDIGTQTIAWSSDTEVRLAELAAGIKQNQKKIAELKRKMDRSRRAMNPQNYNSNGTAKRGRHKWVKSKRYIRMRGILRELERKNADIRKYEHTCMVNHILSLGNQIYIEDMNWIALARRAKRTKKNKNGRYAKKKRFGKSIGKRAPGMFMLILKQKCNLVGGEYHEVDKSTFKASQYDHITDTFRKKPLGKRWNVLGGTDNVQRDMYSSFLIKNSDDTYMQTDRNRCIDTYTHFKELHDIEIERLMNENKKHLSSMGVA

SEQ ID NO: 2001 - protein, 551 aa, unidentified
  REGION 1..551: note = Description of Unknown: uncultivated organism sequence
  REGION 1..551: note = Category: MG81 effectors
  REGION 1..551: note = Description: MG81-279 effector
MSNLLFLLENEEKMRYNGVEKQREGEGTRVKRSSTDTCCLTLPLKLEKWQSDRLEKRFEIGRQIYNTIVHAELKKLRKLERTQQYQEIEQKLENAKQEETKELWKKKRQLLDQNGLSENHFKADMKYYYPHFKDNIASSVAVHGIASQAWTAFEKVLLSKDGKMVHFKKKGELSSLRGYSQAGKSGGIEIIFRGSYVEWKGLKLPLQLSPNNEYETEMLSKRVKYVRILRKDGKTKTHWYAQLALEGKPAVKRDSISGAPKHPVGHGVVGIDIGTRTLAYSTDSEVNLLELADRVQNIEQEKRRLQRKMDRSRRAMNPGNYKPDGSIKQGVKLTWNNSKRYKRIQHQYAMIQHHQADIRKQQHNELANYLLTLGDCFFVENMSYCDLVHRANKTEISEKTGRYKRKKRFGKSIANKAPAMLITMLKQKCQSRGLKGVKEVDTHVRASQYNHQTDTCIEKALENRWNVMPDGERIQRDLYSAFLLQHCRRDLPEYNRKELQKEFGEELYRVFDREALQRDYPQFVAYHHMTIQRLSELPHTIPSMGIRRIIS

SEQ ID NO: 2002 - protein, 522 aa, unidentified
  REGION 1..522: note = Description of Unknown: uncultivated organism sequence
  REGION 1..522: note = Category: MG81 effectors
  REGION 1..522: note = Description: MG81-280 effector
MKRSSTDTCCLTLPLKLEKWQSDRLEKRFEIGRQIYNTIVHAELKKLRKLERTQQYQEIEQKLENAKQEETKELWKKKRQLLDQNGLSENHFKADMKYYYPHFKDNIASSVAVHGIASQAWTAFEKVLLSKDGKMVHFKKKGELSSLRGYSQAGKSGGIEIIFRGSYVEWKGLKLPLQLSPNNEYETEMLSKRVKYVRILRKEGKTKTHWYAQLALEGKPAVKRDSISGAPKHPVGHGVVGIDIGTRTLAYSTDSEVNLLELADRVQNIEQEKRRLQRKMDRSRRAMNPGNYKPDGSIKQGVKLTWNNSKRYKRIQHQYAMIQHHQADIRKQQHNELANYLLTLGDCFFVEDMDYRALTRKAKKTEISEKTGRYKRKKRFGKSIANKAPSMLIALLDQKCKSLNLEGVKKVDTAVKASQYNHQTDECKAKELKERWNIMPDGERIQRDLYSAFLLQHCRRDLPEYNRKKLQETFGNELYRVFDREALQRDYPKFVEYHRETIQRLSALPKTIASMGIRRIIS

SEQ ID NO: 2003 - protein, 538 aa, unidentified
  REGION 1..538: note = Description of Unknown: uncultivated organism sequence
  REGION 1..538: note = Category: MG81 effectors
  REGION 1..538: note = Description: MG81-281 effector
MNNEEKEKEGATCCLTLPLKLEKWQSDHLEKRFEIARQLYNTLVHAELKKKCQVERMPEYQEIMKMIDTASNQKEKWALEKKRKAFLEENGFSRNAFKADMEKYYKHFNDNIGANVALHGITAQVWIAFDKVFVDNYKQKGKVHFKKPGELCSVQGYSQKKSGGKEIMFREDRIIWNQQGNRDRKKVKREFLLKLSPDNPYEAEMLKRHVKFVRILCKDGKTKPHWYAQLVLEGKPAVKRDPISSAPKHPVGHGVVGIDIGTRTLAYSTDKEVNLLELADHVQNIEQEKRRLQRKMDRSRRATNPENYNPDGTFKRGVKLTRNKSKRYRRIQHQLAMIQHHQADIRKQQHNELANYLLTLGDCFFVENMSYCDLVHRANKTEISEKTGRYKRKKRFGKSIANKAPAMLITMLKQKCQSRGLKGVKEVDTHVRASQYNHQTDTCIEKALENRWNVMPDGERIQRDLYSAFLLQHCKQGLPEYNRKELKKEFGEELYRVFDREALQRDYPQFVAYHHMTIQRLSELPHTIPSMGIRRIIS

SEQ ID NO: 2004 - protein, 550 aa, unidentified
  REGION 1..550: note = Description of Unknown: uncultivated organism sequence
  REGION 1..550: note = Category: MG81 effectors
  REGION 1..550: note = Description: MG81-282 effector
MGRKSTGRGGTRVNNEEKEKDGATCCLTLPLKLEKWQSDHLEKRFEIARQLYNTLVHAELKKKCQVVRMPEYQEIMKMIDAASNQKEKWALEKKRKAFLGENGFSRNAFKADMEKYYKHFNDNIGANVALHGITAQVWIAFDKVFVDNYKQKGKVHFKKPGELCSVQGYSQKKSGGKEIMFREDRIIWNQQGNRDRKKVKREFLLKLSPDNPYEAEMLKRHVKFVRILRKDGKTKPHWYAQLVLEGKPAVKRDPISSAPKHPVGHGVVGIDIGTRTLAYSTDKEVNLLELADRVQNIEQEKRRLQRKMDRSRRAMNPENYNSDGTFKRGVKLTRNKSKRYRRIQHQLAMIQHHQADIRKQQHNELANYLLTLGDCFFVENMSYCDLVHRANKTEISEKTGRYKRKKRFGKSIANKAPAMLITMLKQKCQSRGLEGVKEVDTHVRASQYNHQTDTCIEKALENRWNVMPDGERIQRDLYSAFLLQHCKQGLPEYNRKELKKEFGEELYRVFDREALQRDYPQFVAYHHMTIQRLSELPHTIPSMGIRRIIS

SEQ ID NO: 2005 - protein, 1387 aa, unidentified
  REGION 1..1387: note = Description of Unknown: uncultivated organism sequence
  REGION 1..1387: note = Category: MG81 effectors
  REGION 1..1387: note = Description: MG81-283 effector
MKLTKVEKARIAVSREKKDSGRIILYTNPEDVKKTSVTTMEQQVSKRIDQANKLYQVFFKSVIPVELNKHFAEISKIAAKCRNTEEFYKKACGYSGYEWTDAKQKKRTSQISRFSYTSSGKNMYVVMDNFVKEYMVQIWQEKDFRNAAVKILCCICDGKKFASKLEKVKKESPDTLKKFIEISGKCEENPFVDYDTSFLEKVFTLVISQMVKNCDRKSYEQDDKEKIKKSIQKEIQWLSHVQSVTERSFGREGKTYLLFKIRNPYATEERLQTVLIRMRKTLKRGRNRDIAIVLLQGLAQMNQVTFTDTVKHLYQEEEKAFCDFIDAVNRDYYRVNIVKSVRNMDVKVQPDLNDNSILKLSGLGNIKKEALSDTLLRYAASADESDQVLLDIKKLLFEYFLPENSKETSKYTTVQNLWNIPYLPKIFFDYGFENEDFDDDNECAEDIETLCDVEPQYKINQHSLKRRIRYVNYGKYLQMTKNESDRERRYWIHYIKEFVEKNYVDSGRTLSEKNCYASSMMLNCWKEIIRYLCGKYIDIGKAVFHFTNLTAMPKPKDKIIYGQLEEQYKKGISSFDYEAIKAEETLQRDIVQSVVAAAFAFSKSVIDETKMEECQETNKEDILFLSENVLGSLLKENTIKLILRFYGGESTVAQKEYFDQQEIVQEMISHLKSIRNENFHYLDGAKKDNPHKYASILWKNDEMAYQKLTKQRYYANNVGLFYRAEEIQELVQELYSQKNITEAQIPAFRTVLKRKDLPGYMEELGILFPDNTQEKSKGDFEGTLYFLMKEIYYRDFIVKDKAAAYFFKAVDQNKEQSKKEDKHTERAAENFHRYVKSLEKKYNKKEISFGTVCQYIMMEYNQQNTTKQETEIYKHFKMLISLCIRKAFGNYIKETYRFLFHPIYSKQQGEPEYLDTLELESGVKEKNYEWFTLAHFLHPVQLNHLVGDLKSYIQYREDILRRIVFAEQRVYADQQKEVQQKVKTAKEILEVLEFVREVSGRVSNEYTDYYENEEEYAEFLYQYIDFRKREGKSAFESLKYFCQNILDSGTVVDLYADTENPKVLRNIELTRMYAGSNVKIPEYEKITEDEIKMYYQEKNSVALILSRGLCRNEKEQKKVIEFNWKKKRLTLNEITDVFSLVNDLLGKMISFSYLRERDQMYLLLGFYYMALCAENKSENHLGWKGETLDKLESSDSKFDIGGGLVLYQIVSAFNFGSKLLYISEDGRWKMAGGAFPGKYGRFENDYNHRTSLSKVIRLFENESYEREIIYWRDYVDHMKYYVNQNQSIMEIYSAFYSKVLGYSAKLRKSVVFNLQAALEKHHINPECIWMTSDGKCADIKLMKNLESQKFTYKLAKREGEKTERKICMNALNENFLKTIRTSLEYKK

SEQ ID NO: 2006 - protein, 536 aa, unidentified
  REGION 1..536: note = Description of Unknown: uncultivated organism sequence
  REGION 1..536: note = Category: MG81 effectors
  REGION 1..536: note = Description: MG81-284 effector
MNNEEKEKDGATCCLTLPLKLEKWQSDHLEKRFEIARQLYNTLVHAELKRIHRIERMPEYREIERLIEATTDKKEKWALKNQKKQFLRKNGINRNTFTTDMKRLYKHFNDNIGSNVAQHGIVSQVLTAFEKVYIENQSGEVHFKKPGDLRSVQGYSQKKSGGVEIMFREGKIIWNQQGNNDRKGVAREFPLKLSPDNSYEAEMLKKHVKFVRILRKDGKTKPHWYAQLVLEGKPAIKRDPASGAPKHPIGHGVVGIDIGTRTLAYSADSKVDLIELADRVQNIEQEKLLLQRKLDRSRRATNPENYKPDGTIKKGVKLTWNNSKRYKRIQHQYAMIQHHQADIRKQQHNELANYLLTLGDCFFVEDMDYRALTRKAKETEISEKTGRYKRKKRFGKSIANKAPSMLITLLDQKCKSLNLEGVKKVDTAVKASQYNHQTDECKAKELKERWNIMPDGERIQRDLYSAFLLQHCRRDLPEYNRKKLQEAFGNELYRVFDREALQRDYPKFVEYHRKTIQRLSALPKTIASMGIRRSIS

SEQ ID NO: 2007 - protein, 522 aa, unidentified
  REGION 1..522: note = Description of Unknown: uncultivated organism sequence
  REGION 1..522: note = Category: MG81 effectors
  REGION 1..522: note = Description: MG81-285 effector
MKRSSTDTCCLTLPLKLEKWQSDRLEKRFEIGRQIYNTIVHAELKKLRKLERTQQYQEIEQKLENAKQEETKELWKKKRQLLDQNGLSENHFKADMKYYYPHFKDNIASSVAVHGIASQAWTAFEKVLLSKDGKMVHFKKKGELSSLRGYSQAGKSGGIEIIFRGSYVEWKGLKLPLQLSPNNEYETEMLSKRVKYVRILRKEGKTKTHWYAQLALEGKPAVKRDSISGAPKHPVGHGVVGIDIGTRTLAYSTDSEVNLLELADRVQNIEQEKRRLQRKMDRSRRATNPENYNPDGTFKRGVKLTRNKSKRYRRIQHQLAMIQHHQADIRKQQHNELANYLLTLGDCFFVENMSYCDLVHRANKTEISEKTGRYKRKKRFGKSIANKAPAMLITMLKQKCQSRGLKGVKEVDTHVRASQYNHQTDTCIEKALENRWNVMPDGERIQRDLYSAFLLQHCKQGLPEYNRKELKKEFGEELYRVFDREALQRDYPQFVAYHHMTIQRLSELPHTIPSMGIRRIIS

SEQ ID NO: 2008 - protein, 530 aa, unidentified
  REGION 1..530: note = Description of Unknown: uncultivated organism sequence
  REGION 1..530: note = Category: MG81 effectors
  REGION 1..530: note = Description: MG81-286 effector
MANNNNNNNNNNTDTCVLTLPLRVEKWQEDCLLKRFEAARRIYNSLLNFELKKLRQLERTVEYRQIQSVISSAYRSNTKDSPECKDAFKRREKLISANGISENGFKSDVKFFYKHFDGLIGSNVAVHCIAVQLWAAFDKYLSGSGKEIHFKRLGDISSLKGYSVKGKSGGREIIFRGQYVEWTRKKKKLLLPLKIDPDNEYEREMLSRRVKYVRIIKKPGKNRLRWYAQLTLEGKPALKYSAETGKPIHSVGKGNVGIDIGPQTVAYASDKEVALLELADRVTNIEHQKKKLQRKLDRSRRATNPDNYKPDGTIKRGVKLTRNKSKRYLKLQSKLAYIQHRQAEIRKLQHTCLANHMLTLGDRFFVEKMNWPSLAHRAKETSISEKTGRYKRKKRFGKSLANKAPAMFISILKRKCETLGLPGVVEVDTYSLKASQYNHLSDTYEKKSLSERWNYMPISDGSDSSKTKRIQRDLYSAFLLQHTIPQPCSFDKEALRIDYPNFVTMHDAEIHRLESLPKTITSMGVRRSHS

SEQ ID NO: 2009 - protein, 550 aa, unidentified
  REGION 1..550: note = Description of Unknown: uncultivated organism sequence
  REGION 1..550: note = Category: MG81 effectors
  REGION 1..550: note = Description: MG81-287 effector
MGWKSKGRGGTLVDNEEKKEDGATCCLTLPLKLEKWQSDHLEKRFEIARQLYNTLVHAELKKKCQVERMPEYQEIMKMIDTASNQKEKWALEKKRKAFLEENGFSRNAFKADMEKYYKHFNDNIGANVALHGITAQVWIAFDKVFVDNYKQKGKVHFKKPGELCSVQGYSQKKSGGKEIMFREDGIIWNQQGNRDRKKVKREFLLKLSPDNPYEAEMLKRHVKFVRILRKDGKTKPHWYAQLVLEGKPAVKRDPASGAPKHPIGHGVVGIDIGTRTLAYSTDKEVNLLELADRVQNIEQEKRRLQRKMDRSRRATNPENYNPDGTFKRGVKLTRNKSKRYKRIQHQYAMIQHHQADIRKQQHNELANYLLTLGDCFFVENMSYCDLVHRANKTEISEKTGRYKRKKRFGKSIANKAPAMLITMLKQKCQSRGLEGVKEVDTHVCASQYNHQTDTCIKKALENRWNIMPDGERIQRDLYSAFLLQHCRRDLPEYNRKELQKEFGEELYRVFDREALQRDYPQFVAYHHMTIQRLSELPHTIPSMGIRRIIS

SEQ ID NO: 2010 - protein, 511 aa, unidentified
  REGION 1..511: note = Description of Unknown: uncultivated organism sequence
  REGION 1..511: note = Category: MG81 effectors
  REGION 1..511: note = Description: MG81-288 effector
MGKSSTDTCCLTLPLKLEKWQEDRLAKRFEIARQIYNTMVRAELKRLRQVEQSPQYRSNKKAIQALDWKNTADKPKLKTLYRERDKLLKGGGFTKYGFKSDIKNFYKHFAENIGSSVAVHGIAPQVWAAFERVLFKKEGKKVHFKKTGDIRSLRGYSVTGKSGGVEIIFRGSYIEWKGLNLPLKLSPDNAYETEMLSYRVKYVRILRKPGKTRDRWYAQLSLEGKPAIKRNPASGNPVHPVGQGTVGLDIGPQTLAYAAEKEANLVELADRVQNIEREKHLLQRKMDRSRRAANPDNYAENGTIRRGVKLTHNKSKRYLRLQRELCYLQHCQAETRKRQHTELANHLLSLGSCFYVEDMAWPSLTHRAKKTEISDKTGRIKRKKRFGKSIANKAPAALINILRTKCVSLGIPGVVEVPTSLKASQYNHQSKEYTPKPLSQRWNDMPDGSRIQRDLYSAFLLQHYDPQSGNFDQASLEADYPQFVQLHNQSIQRLLTVPKTPSSMGIRRSVS

SEQ ID NO: 2011 - protein, 532 aa, unidentified
  REGION 1..532: note = Description of Unknown: uncultivated organism sequence
  REGION 1..532: note = Category: MG81 effectors
  REGION 1..532: note = Description: MG81-289 effector
MILLAKNNNNNNNNTDTCVLTLPLRVEKWQEDCLLKRFEAARRIYNSLLNFELKKLRQLERTVEYRQIQSVISSAYRSNTKDSPECKDAFKRREKLISANGISEYGFKSDVKFFYKHFDGLIGSNVAVHCIAVQLWAAFDKYLRGSGKEIHFKRLGDISSLKGYSVKGKSGGCEIIFRGQYIEWTRKKKKLLLPLKIDPDNEYEREMLSRRVKYVRIIKKPGKNRLRWYAQLTLEGKPALKYSAETGKPIHSVGKGNVGIDIGPQTVAYASDKEVALLELADRVTNIEHQKKKLQRKLDRSRRATNPDNYKPDGTIKRGVKLTRNKSKRYLKLQSKLAYIQHRQAEIRKLQHTCLANHMLTLGDRFFVEKMNWPGLAHRAKETSISEKTGRYKRKKRFGKSLANKAPAMFISILKRKCETLGLPGVVEVDTYSLKASQYNHLSDTYEKKSLSERWNYMPISDGSDSSKTKRIQRDLYSAFLLQHTIPQPCSFDKKALRIDYPNFVTMHDAEIHRLESLPKTITSMGVRRSHS

SEQ ID NO: 2012 - protein, 512 aa, unidentified
  REGION 1..512: note = Description of Unknown: uncultivated organism sequence
  REGION 1..512: note = Category: MG81 effectors
  REGION 1..512: note = Description: MG81-290 effector
MPTKQKEDSNRCVLTLPLLTEPWQEHIIEKRFKIIEHLKNQLISIELRKLKNLQRTKAYKNLMKRIESVPKAERTALYKERNKMLEGKGFSQYTFMDDMAGKKSLMQKHFESHINVQIAHKAAIDVWSSFEKFLFGSGQMIHYQKRGTLSSVASKSPKTGMFYYSDENIFKWSGGGTKPKGGIILCLRVASVKTNYEKEMVANNEIKYYRVVRKWMKTKYKYYLQITFAGKPADKHREISTGRVGIDIGTQTIAIASDKSVKLLELADKVNKNHIKKCELQRKLDRSRRYTNPDNFNPDGTVKRGTKGHKLKWNKSKHYIEIAGKIRELERKNADIRKYQHTCLANDILAMGNQIYIEPMNYKGLQKRAKETQVDEKGRYKKKKRFGKSLANKAPAMFVTILKTKAEQHGGEVYEVDIMSYRASQCDHTTGEYTKHGLNDRWRILGNGDKVQRDLYSAFLIKNSNKTHDEIDLDKCSKTYDNFKKLHDKEIENIRNEVKLRERKNISSYGIA

SEQ ID NO: 2013 - protein, 467 aa, unidentified
  REGION 1..467: note = Description of Unknown: uncultivated organism sequence
  REGION 1..467: note = Category: MG81 effectors
  REGION 1..467: note = Description: MG81-291 effector
MAKCSTDTCCLTLPLRLEKWQEDRLAKRFEIARQIYNTMVRAELKKLRAMEQSEPYKANQEKIQALDRKTQTDKQALKALYKERDKLLRDGGFSEYGFKSDIKNYYKHFNNNIGSNVAFHGIAPQVWAAFEKMLFKKEGKKVHFKKKGDIRSLRGYSVTGKSGGVEIIFRETYIEWKGLKLPLKLSPDNIYETQMLSYRVKYVRLLRKPGKRKDRWYAQLSLEGKPVIKYNPKTGEVRHPIGKGAVGLDIGPQTLAYSAATGADLVELANQVQNVEQEKRRLQRKLDRSRRATNPGNYANDGTIRRGIALTHNQSKRYLRTQQELKYLQHQQAEIRKRQHTELANHLLSLGDCFYVEKMVWTSLTHRAKETEISEKTGKIKRKKRFGKSVANKAPATLIGILQRKSAALGIPGVIEVPTSVKASQYNHQSGTYTPKPLSQRWNNMPDGERIQLRIFITALRPANKHF

SEQ ID NO: 2014 - protein, 511 aa, unidentified
  REGION 1..511: note = Description of Unknown: uncultivated organism sequence
  REGION 1..511: note = Category: MG81 effectors
  REGION 1..511: note = Description: MG81-292 effector
MAKCSTDTCCLTLPLRLEKWQEDRLAKRFEIARQIYNTMVRAELKKLRAMEQSEPYKANQEKIQALDWKTQTDKQALKALYKERDKLLRDGGFSEYGFKSDIKNYYKHFNNNIGSNVAFHGIAPQVWAAFEKMLFKKEGKKVHFKKKGDIHSLRGYSAAGKSGGVEIIFRETYIEWKGLKLPLKLSPDNIYETQMLSYRVKYVRLLRKPGKRKDRWYAQLSLEGKPVIKYNPKTGEVRHPIGKGAVGLDIGPQTLAYSAATGADLVELANQVQNVEQEKRRLQRKLDRSRRATNPGNYADDGTIRRGIALTHNKSKRYLRTQQELKYLQHQQAEIRKRQHTELANHLLSLGDCFYVEKMVWTSLTHRAKETEISEKTGKIKRKKRFGKSVANKAPATLIGILQRKSAALGIPGVIEVPTSVKASQYNHQSGTYTHKPLSQRWNNMPDGERIQRDLYSAFLLQHYDPQTNTFDANSLHQDYPQFVQYHHDAVLRLYAMPKAPSSMGIKRSLR

SEQ ID NO: 2015 - protein, 510 aa, unidentified
  REGION 1..510: note = Description of Unknown: uncultivated organism sequence
  REGION 1..510: note = Category: MG81 effectors
  REGION 1..510: note = Description: MG81-293 effector
MKKCSTDTCCLTLPLKLEKWQEDRLAKRFELARQIYNTMVHAELKKLKALEHSEQYQEIQEQLRVLTQKEHQDKKKLRLLYKARDELLKSWGFSEYGFKENIKYYYKHFNKNIGSSVAFHGIAPQVWTAFEKVLFGNGKKVHYKRFGEMRSLRGFSSTGKSGGVEIMFRGTYIEWKGLKLLLKLSPNNAYENEMLSYRVKYVRLIRKPGKQKDRWYAQLVLEGKPAVKYDLGTGKAIHPVGSGAVGLDIGPQTLAYSASSEADLVELADQVQNIEQIKCRLQRKMDRSRRATNPDNYKDDGTIKRGVKLTHNKSKRYCKIQRELKYLQHCQAETRKRQHIQLANHLISLGDCFYVEEMSWAALVHRSKKTEVSEKTGRFKRKKRFGKSIANKAPRSMIEILRQKCISLGVPGVIEVPTSVRASQYNHQSDEYTKKTLSQRWNLMPDGQRIQRDLYSAFLLQHYDPKTENFDSDSLQHDYPQFVIYHQQVIQRLSVIPKTPSSMGIYRSVR

SEQ ID NO: 2016 - protein, 512 aa, unidentified
  REGION 1..512: note = Description of Unknown: uncultivated organism sequence
  REGION 1..512: note = Category: MG81 effectors
  REGION 1..512: note = Description: MG81-294 effector
MKKSSTDTCCLTLPLKLEKWQEDRLAKRFEIARQLYNTLVHAELKRLAQVKQTAEYRENERKIRTLDWNDPGDQAKLKGLYKERRKSLKTAGFTDYSFTTDMGKYYKHFRDNIGSSVAVHGIAPQVWAAFDKLLFKKGGKKVHYKKPGEVNSVQGYSRTGKSGGTEIMFRGPYIEWKGLKLPLKLSPDNAYETDMLQRRVKLVRLVRRPGKRRDRWYAQLVLEGKPAIKADPVTGKAVHPIGSGPVGLDIGPQTLAYSAAGAAGLVELADRVQNIEQEKRCLQRKMGRSRRATNPDNYAEDGTIRRGVKLTHNKSKRYRRSQQELKYLQRRQAEIRKLQHIQLANHLLSLGDHFYVEKMEWSSLTHRAKKTVISEKTGKPRSKKRFGKSIANKAPAMLIEILRQKCKSLGLPNVVEINPADIKASQYNHLTGEYVKKSLSRRWNDMQDGEHLQRDLYSAFLLQHYDSMSKALDLDSLARDYPAFVQYHHQEIERLHALPKTPASMGIRRSIA

SEQ ID NO: 2017 - protein, 602 aa, unidentified
  REGION 1..602: note = Description of Unknown: uncultivated organism sequence
  REGION 1..602: note = Category: MG81 effectors
  REGION 1..602: note = Description: MG81-295 effector
MTTILRAYKTELDPTDEQRVVLARHVAGARVAHNWALEKWKELDGTRGVALGCRALAGIDAKGGEAAALFGYCLAALIRGEPVKVRTPKSEAGSRYRYRPASGVQLPDFRAGRVDWYSQLVSAKEEQPERFGWLSELSAFAIREAVLDVADGWKHFFEHLKAGRYASAGPPRFRGRQRASYHSDQPDPIRVTERAVKIPGVGWVRMKERGYLPVTEENSHRFIGGGKACGLGVSEKDGRWYVALRCEVPRPFPQKRGPGRALAMHQTKRVPGRELGVEVGVRVLAVASTGERAGHVWHSPLRDDRRIDKFEMLRKRWERRMARRWKDGVKTRDQSQGWKEAAMRVAHYHARIKSLRDDVCGKAARQIADMGAETVRMRGPGIAKMLSRAGKRGDAARTRNRLAKNVHAARMGDLRRRLEYKQAWAGGRLELVPIEEPTTNRCSACNAVRDTNAGYPTFMCPTCGYQEDRDDNSAINLLNYRAPSGDPAAGPRSAGLKPPKGDNGRRKRTARAEEKSSVTAPHGDVTSAPGPGNRVSGASHSVRPIDAYHEVPFEQSGDAHLGSRQFGLDTALFGADDPNRSQIEPQRSEFPGLLAHRAGGTS

SEQ ID NO: 2018 - protein, 525 aa, unidentified
  REGION 1..525: note = Description of Unknown: uncultivated organism sequence
  REGION 1..525: note = Category: MG81 effectors
  REGION 1..525: note = Description: MG81-296 effector
MTKNNNNTDTCVLTLPLRVEKWQEDCLLKRFEAARRIYNSLLNFELKKLRQLERTVEYRQIQSVISSAYRSNTKDSPECKDAFKRREKLISANGISEYGFKSDVKFFYKHFDGLIGSSVAVHCIAVQLWAAFDKYLRGSGKEIHFKRLGEISSLKGYSVKGKSGGLEIIFRGQYVEWTRKKKKLLLPLKIDPDNEYEREMLSRRVKYVRIIKKPGKNRLRWYAQLTLEGKPALKYSAETGKPIHSVGKGDVGIDIGPQTVAYASDKEVALLELADRVTNIEHQKKKLQRKLDRSRRATNPDNYKPDGTIKRGVKLTRNKSKRYLKLQSKLAYIQHRQAEIRKLQHTCLANHMLTLGDRFFVEKMNWPGLAHRAKETSISEKTGRYKRKKRFGKSLANKAPAMFISILKRKCETLGLPGVVEVDTFRLKASQYNHLSDTYEKKSLSERWNYMPISDGSDSSKTKRIQRDLYSAFLLQHTIPQPCSFDKEALREDYPNFVTMHDAEIHRLEYLPKTITSMGVRRSHS

SEQ ID NO: 2019 - protein, 527 aa, unidentified
  REGION 1..527: note = Description of Unknown: uncultivated organism sequence
  REGION 1..527: note = Category: MG81 effectors
  REGION 1..527: note = Description: MG81-297 effector
MAKKNNNNNTDTCVLTLPLRVEKWQEDCLLKRFEAARRIYNSLLNFELKKLRQLERTVEYRQIQSVISSAYRSNTKDSPECKDAFKRREKLISANGISENGFKSDVKFFYKHFDGLIGSNVAVHCIAVQLWAAFDKYLSGSGKEIHFKRLGDISSLKGYSVKGKSGGCEIIFRGQYVEWTRKKKKLLLPLKIDPDNEYEREMLSRRVKYVRIIKKPGKNRLRWYAQLTLEGKPALKYSAETGKPIHSVGKGNVGIDIGPQTVAYASDKEVALLELADRVTNIEHQKKKLQRKLDRSRRATNPDNYKPDGTIKCGVKLTRNKSKRYLKLQSKLAYIQHRQAEIRKLQHTCLANHMLTLGDRFFVEKMNWPGLAHRAKETSISEKTGRYKRKKRFGKSLANKAPAMFISILKRKCETLGLPGVVEVDTFRLRASQYNHLSDTYEKKSLSERWNYMPISDGSDSSKTKRIQRDLYSAFLLQHTIPQPCSFDKEALRIDYPNFVIMHDAEIHRLESLPKTITSMGVRRSHS

SEQ ID NO: 2020 - protein, 542 aa, unidentified
  REGION 1..542: note = Description of Unknown: uncultivated organism sequence
  REGION 1..542: note = Category: MG81 effectors
  REGION 1..542: note = Description: MG81-298 effector
MATTDKKDEDKEKLRAYKFRLDPNQAQTIALYQAAGAARYTYNMLTAYNLEVNRLRDEYWKKRHDEGISDADIKKELNALAKEDKRYKQLKYGAFGTQYLTPEKKRHEQAEHRIENGEDPSVVWNQETERSANPWLHTANRRVLVSGLQNASDAWDNFWDSRTGKRAGRLVGTPRFKKKGVSRDSFTVPAAEKMGAYGAAYLRGEPAYKQGRRKITDYRHVRLSYLGTIRTFNSTKPLVKAVAAGAKIRSYTVSRNADRWYVSFLVKFSEPIRRSATKRARAAGSVGVDLGVKYLASLSDSEAPQRFPNLKFVEGLPSLENPRWSEASSRRLHKLQRALARSQKGSNRRSRLVKQIARLHHMTALRRESNLHQLTKKLATGYTLVGFEDLNVSGMTASAKGTVENPGKNVAQKSGLNRVVLDAAFGVFRNQLEYKAVWYGSAFEKVNRYFASSQTCSECGRKAKTKLTLRDRVFDCAYCGNMMDRDFNAAVNICREAQRLFDEKLASEDGESLNGRGSRGALRGAKTVEASRPPASHRRGSP

SEQ ID NO: 2021 - protein, 514 aa, unidentified
  REGION 1..514: note = Description of Unknown: uncultivated organism sequence
  REGION 1..514: note = Category: MG81 effectors
  REGION 1..514: note = Description: MG81-299 effector
MGNSSTDTCCLTLPLKLEKWQEDRLAKRFELARQIYNTLVRAELKKLERVKHSAPYREIQGQIQALDWSNPNDKGALRRLYKARDALLKSSGFTEYSFKSDIKYYYKHFSDNIGSDVAFHGIAPQVWTAFEKVLFKGGKKIHYKQYGDVSSVQGYSKTRKSGGREIMFRGTYIEWKGLKLPLKLSPDNAYENEMLRYRIKFVRLVRKPGKQKDRWYAQLVLEGKPVVKREPATGEAVHPVGSGVVGLDIGPRTLAYSAPGEAGLVELADQVQNIEQAKCRLQRKLDRSRRATNPDNYSENGTIRRGVKLTRNKSKRYRKIQNQLKYLQYCQAETRKRQHTQLANHLLSLGDSFYVEDMPWPALARRAKETVVSEKTGRIKRKKRFGKSIANKAPATLTRILKQKCTSLGLPGVVEVPTSVRASQYNHQTGEYIKKPLSQRWNNMPDGQRIQRDLYSAFLLQHYDPGTGTFDSASLQRDYPQFTQYHHQVIQHLLSMPKTLSSMGIRQSIRQYEF

SEQ ID NO: 2022 - protein, 1387 aa, unidentified
  REGION 1..1387: note = Description of Unknown: uncultivated organism sequence
  REGION 1..1387: note = Category: MG81 effectors
  REGION 1..1387: note = Description: MG81-300 effector
MKLTKVEKARIAVSREKKDSGRIILYTNPEDVKKTSVTTMEQQVSKRIDQANKLYQVFFKSVIPVELNKHFAEISKIAAKCRNTEEFYKKACGYSGYEWTDAKQKKRTSQISRFSYTSSGKNMYVVMDNFVKEYMVQIWQEKDFRNAAVKILCCICDGKKFASKLEKVKKESPDTLKKFIEISGKCEGNPFVDYDTSFLEKVFTLVISQMVKNCDRKSYEQDDKEKIKKSIQKEIQWLSHVQSVTERSFGREGKTYLLFKIRNPYATEERLQTVLIRMRKTLKRGRNRDIAIVLLQGLAQMNQVTFTDTVKHLYQEEEKAFCDFIDAVNRDYYRVNIVKSVRNMDVKVQPDLNDNSILKLSGLGNIKKEALSDTLLRYAASADESDQVLLDIKKLLFEYFLPGNSKETSKYTTVQNLWNIPYLPKIFFDYGFENEDSDDDNECAEDIETLCDVEPQYKINQHSLKRRIRYVNYGKYLQMTKNESDRERRYWIHYIKEFVEKNYVDSGRTLSEKNCYASSMMLNCWKEIIRYLCGKYIDIGKAVFHFTNLTAMPKPKDKIIYGQLEEQYKKGISSFDYEAIKAEETLQRDIVQSVVAAAFAFSKSVIDETKMEECQETNKEDILFLSENVLGSLLKENTIKLILRFYGGESSVAQKEYFDQQEIVQEMISHLKSIRNENFHYLDGAKKDNPHKYASILWKNDEMAYQKLTKQRYYANNVGLFYRAEEIQELVQELYSQKNITEAQIPAFRTVLKRKDLPGYMEELGILFPDNTQEKSKGDFEGTLYFLMKEIYYRDFIVKDKAAAYFFKAVDQNKEQSKKEDKHTERAAENFHRYVKSLEKKYNKKEISFGTVCQYIMMEYNQQNTTKQETEIYKHFKMLISLCIRKAFGNYIKETYRFLFHPIYSKQQGEPEYLDTLELESGVKEKNYEWFTLAHFLHPVQLNHLVGDLKSYIQYREDILRRIVFAEQRVYADQQKEVQQKVKTAKEILEVLEFVREVSGRVSNEYTDYYENEEEYAEFLYQYIDFRKREGKSAFESLKYFCQNILDSGTVVDLYADTENPKVLRNIELTRMYAGSNVKIPEYEKITEDEIKMYYQEKNSVALILSRGLCRNEKEQKKVIEFNWKKKRLTLNEITDVFSLVNDLLGKMISFSYLRERDQMYLLLGFYYMALCAENKSENHLGWKGETLDKLESSDSKFDIGGGLVLYQIVSAFNFGSKLLYISEDGRWKMAGGAFPGKYGRFENDYNHRTSLSKVIRLFENESYEREIIYWRDYVDHMKYYVNQNQSIMEIYSAFYSKVLGYSAKLRKSVVFNLQAALEKHHINPECIWMTSDGKCADIKLMKNLESQKFTYKLAKREGEKTERKICMNALNENFLKTIRTSLEYKK

SEQ ID NO: 2023 - protein, 538 aa, unidentified
  REGION 1..538: note = Description of Unknown: uncultivated organism sequence
  REGION 1..538: note = Category: MG81 effectors
  REGION 1..538: note = Description: MG81-301 effector
MDNEEKKEDGATCCLTLPLKLEKWQSDHLEKRFEIARQLYNTLVHAELKKKCQVERMPEYQEIMKMIDTASNQKEKWALEKKRKAFLEENGFSRNAFKADMEKYYKHFNDNIGANVALHGITAQVWIAFDKVFVDNYKQKGKVHFKKPGELCSVQGYSQKKSGGKEIMFREDRIIWNQQGNRDRKKVKREFLLKLSPNNPYEAEMLKRHVKFVRILRKDGKTKPHWYAQLVLEGKPAVKRDPISSAPKHPVGHGVVGIDIGTRTLAYSTDKEVNLLELADRVQNIEQEKRRLQRKMDRSRRAMNPENYNPDGTFKRGVKLTRNKSKRYRRIQHQLAMIQHHQADIRKQQHNELANYLLTLGDCFFVENMSYCDLVHRANKTEISEKTGRYKRKKRFGKSIANKAPAMLITMLKQKCQSRGLEGVKEVDTHVRASQYNHQTDTCIEKALENRWNVMPDGERIQRDLYSAFLLQHCKQGLPEYNRKELKKEFGEELYRVFDREALQRDYPQFVAYHHMTIQRLSELPHTIPSMGIRRIIS

SEQ ID NO: 2024 - protein, 511 aa, unidentified
  REGION 1..511: note = Description of Unknown: uncultivated organism sequence
  REGION 1..511: note = Category: MG81 effectors
  REGION 1..511: note = Description: MG81-302 effector
MAKCSTDTCCLTLPLRLEKWQEDRLAKRFEIARQIYNTMVRAELKKLRAIEQSEPYKANQEKIQALDWKTQADKRALKALYKERDKLLRAGGFSERGFKSDIKNYYMHFNNNIGSNVAAHGIAPQVWAAFEKMLFKKEGKKVHFKKKGDIHSLRGYSVTRKSGGVEIIFRETYIEWKGLKLPLKLSPDNIYETQMLSYRVKYVRLLRKSGKRKDRWYAQLSLEGKPVIKYNPKTGEVRHPIGKGAVGLDIGPQTLAYSAATGADLVELANQVQNVEQEKRRLQRKLDRSRRATNPGNYADDGTIRRGIALTHNKSKRYLRTQQELKYLQHQQAEIRKRQHTELANHLLSLGDRFYVEKMAWTSLTHRAKETEISEKTGKIKRKKRFGKSVANKAPATLIGILQRKSAALGIPGVIEVPTSVKASQYNHQSGTYTPKPLSQRWNNMPDGKRIQRDLYSAFLLQHYDPQTNTFDANSLHQDYPQFVQYHHDAVLRLYAMPKTPSSMGIKRSLR

SEQ ID NO: 2025 - protein, 512 aa, unidentified
  REGION 1..512: note = Description of Unknown: uncultivated organism sequence
  REGION 1..512: note = Category: MG81 effectors
  REGION 1..512: note = Description: MG81-303 effector
MKKSSTDTCCLTLPLKLEKWQEDRLAKRFEIARQLYNTLVHAELKRLAQVKQTAEYRENERKIRTLDWNDPGDQAKPKGLYKERRKSLKTAGFTDYSFTTDMGKYYKHFRDNIGSSVAVHGIAPQVWAAFDKVLFKKGGKKVHYKRPGEVNSVQGYSRTGKSGGREIMFRGAYIEWKGLKLPLKLSPDNAYETDMLQRRLKLVRLVRRPGKRRDRWYAQLVLEGKPAIKADPVTGKAVHPIGSGPIGLDIGPQTLAYSAAGVAGLVELADRVQNIEQEKRCLQRKMDRSRRATNPDNYAEDGTIRRGVKLTHNKSKRYRRSQQELKYLQHRQAEIRKLQHIQLANHLLSLGDHFYVEKMEWSSLTHRAKETVISEKTGKPRSKRRFGKSIANKAPAMLIEILRQKCKSLGLSDVVEINPADIKASQYNHLTGEYVKKSLSRRWNDMQDGEHLQRDLYSAFLLQHYDSCSKTLDHDSIVRDYPAFVQYHHREIERLHALPKTPSSMGIRRSIA

SEQ ID NO: 2026 - protein, 534 aa, unidentified
  REGION 1..534: note = Description of Unknown: uncultivated organism sequence
  REGION 1..534: note = Category: MG81 effectors
  REGION 1..534: note = Description: MG81-304 effector
MGWKSKGRGGTLVKKSSTDTCCLTLPLKLEKWQSDRLEKRFEIGRQIYNTVVRAELKKLQQVERTPQYREIEQKLKEAKQEEAKELWKTRTQLLSKSGFSEYGFKSDMKYYYQHFKENIGSSVAVHGIASQVWTAFEKVLFSKDGKMVHFKKKGELSSLRGYSQAGKSGGIEIIFRGSYVEWKGLKLPLKLSPDNDYETEMLSKRVKYVRILRKEGKTKPHWYAQLVLEGKPAIKRDPASGAPKHPVGHGVVGIDIGTRTLAYSADSKVDLIELADRVQNIEQEKMLLQRKLDRSRRATNPENYKPDGTIKKGVKLTRNKSKRYRKIQHQLAMLQHRQADIRKRQHNELANYLLTLGDCFFVEDMDYRALTRKAKKTEISENTGRYKRKKRFGKSIANKAPSMLIALLDQKCKSLNLEGVKKVDTAVKASQYNHQTDECKAKELKERWNIMPDGERIQRDLYSAFLLQHCRRDLPEYNRKKLQETFGNELYRVFDREALQRDYPKFVEYHRETIQRLSALPKTIASMGIRRSIS

SEQ ID NO: 2027 - protein, 511 aa, unidentified
  REGION 1..511: note = Description of Unknown: uncultivated organism sequence
  REGION 1..511: note = Category: MG81 effectors
  REGION 1..511: note = Description: MG81-305 effector
MGKSKTETCCLTLPLKLEKWQEDRLAKRFEIARQIYNTLVHAKLKKLNQIERSSEYQTIQDQITNLDRNDPERIKELPSLYKKRTKLLRDAGFTEYGFKSDVKHYYKYFHKNIGSSVAVHGIAPQVWAAFEKKLFKKQGKIVHYKRKGTLRSVKGGSATGKSGGTEIIFRGTYIQWKDLNLPLKRSPDNAYESEMLGYRVKYVRILRKPGKSKNRWYAQLVLEGKPVIKRNPMTGAALHPVGHGAVGLDIGPQTLAYSAADGVGLLELADQVQNIERQKALLQRKLDQSRRASNPDNYNEDGTIKRGVKLTRNQSKRYCKTQRDLAYLQHCQAETRKRQHIALANHLLTLGDRFYVEQMSWVALARRSKKTEVSEKTGKIKRKKRFGKSIANKAPAMLIEILRQKCISLGLPGVVDVPTSIKASQYNHQSKDYIKKNLSERWNDMPDGEKIQRDLYSAFLLQHCTPELNAFDQESLQQDYPQFVQYHHQVMQQLSEMPKTPSSMGIRRRTS

SEQ ID NO: 2028 - protein, 538 aa, unidentified
  REGION 1..538: note = Description of Unknown: uncultivated organism sequence
  REGION 1..538: note = Category: MG81 effectors
  REGION 1..538: note = Description: MG81-306 effector
MNNEEKEKEGATCCLTLPLKLEKWQSDHLEKRFEIARQLYNTLVHAELKKKCQVERMPEYQEIMKMIDTASNQKEKWALEKKRKAFLEENGFSRNAFKADMEKYYKHFNDNIGANVALHGITAQVWIAFDKVFVDNYKQKGKVHFKKPGELCSVQGYSQKKSGGKEIMFREDRIIWNQQGNRDRKKVKREFLLKLSPNNPYEAEMLKRHVKFVRILRKDGKTKPHWYAQLVLEGKPAVKRDPISSAPKHPVGHGVVGIDIGTRTLAYSTDKEVNLLELADHVQNIEQEKRRLQRKMDRSRRATNPENYNPDGTFKRGVKLTRNKSKRYRRIQHQLAMIQHHQADIRKQQHNELANYLLTLGDCFFVENMSYCDLVHRANKTEISEKTGRYKRKKRFGKSIANKAPAMLITMLKQKCQSRGRKGVKEVDTHVRASQYNHQTDTCIEKALENRWNVMPDGERIQRDLYSAFLLQHCKQGLPEYNRKELKKEFGEELYRVFDREALQRDYPQFVAYHHMTIQRLSELPHTIPSMGIRRIIS

SEQ ID NO: 2029 - protein, 522 aa, unidentified
  REGION 1..522: note = Description of Unknown: uncultivated organism sequence
  REGION 1..522: note = Category: MG81 effectors
  REGION 1..522: note = Description: MG81-307 effector
MKRSSTDTCCLTLPLKLEKWQSDRLEKRFEIGRQIYNTIVHAELKKLRKLERTQQYQEIEQKLENAKQEETKELWKKKRQLLDQNGLSEDHFKADMKYYYPHFKDNIASNVAVHGIASQAWTAFEKVLFSKDGKMVHFKKKGELSSLRGYSRAGKSGGVEIIFRGSYVEWKGLKLPLKLSPDNDYETEMLSKRVKYVRILRKDGKTKTHWYAQLALEGKPAVKRDSISGVPKHPVGHGVVGIDIGTRTLAYSTDSEVNLLELADRVQNIEQEKRRLQRKMDRSRRAMNPGNYKPDGSIKQGVKLTWNNSKRYKRIQHQYAMIQHHQADIRKQQHNELANYLLTLGDCFFVENMSYCDLAHRANKTEISEKTGRYKRKKRFGKSIANKAPAMLITMLKQKCQSRGLEGVKEVDTHVCASQYNHQTDTCIKKALENRWNVMPDGERIQRDLYSAFLLQHCRRDLPEYNRKELQKEFGEELYRVFDREALQRDYPRFVAYHHMTIQRLSELPHTIPSMGIRRIIS

SEQ ID NO: 2030 - protein, 550 aa, unidentified
  REGION 1..550: note = Description of Unknown: uncultivated organism sequence
  REGION 1..550: note = Category: MG81 effectors
  REGION 1..550: note = Description: MG81-308 effector
MGRKSTGRGGTRVNNEEKEKDGATCCLTLPLKLEKWQSDHLEKRFEIARQLYNTLVHAELKKKCQVVRMPEYQEIMKMIDAASNQKEKWALEKKRKAFLGENGFSRNAFKADMEKYYKHFNDNIGANVALHGITAQVWIAFDKVFVDNYKQKGKVHFKKPGELCSVQGYSQKKSGGKEIMFREDRIIWNQQGNRDRKKVKREFLLKLSPDNPYEAEMLKRHVKFVRILRKDGKTKPHWYAQLVLEGKPAVKRDPISSAPKHPVGHGVVGIDIGTRTLAYSTDKEVNLLELADRVQNIEQEKRRLQRKMDRSRRAMNPENYNSDGTFKRGVKLTRNKSKRYRRIQHQLAMIQHHQADIRKQQHNELANYLLTLGDCFFVENMSYCDLVHRANKTEISEKTGRYKRKKRFGKSIANKAPAMLITMLKQKCQSRGLKGVKEVDTHVRASQYNHQTDTCIEKALENRWNVMPDGERIQRDLYSAFLLQHCKQGLPEYNRKELKKEFGEELYRVFDREALQRDYPQFVAYHHMTIQRLSELPHTIPSMGIRRIIS

SEQ ID NO: 2031 - protein, 485 aa, unidentified
  REGION 1..485: note = Description of Unknown: uncultivated organism sequence
  REGION 1..485: note = Category: MG81 effectors
  REGION 1..485: note = Description: MG81-309 effector
MDNEEKEKDGATCCLTLPLKLEKWQSDHLEKRFEIARQLYNTLVHAELKKKCQVVRMPEYQEIMKMIDAASNQKEKWALEKKRKAFLEENGFSRNAFKADMEKYYKHFNDNIGANVALHGITAQVWIAFDKVFVDNYKQKGKVHFKKPGELCSVQGYSQKKSGGKEIMFREDRIIWNQQGNRDRKKVKREFLLKLSPDNPYEAEMLKRHVKFVRILRKDGKTKPHWYAQLVLEGKPAVKRDPASGAPKHPIGHGVVGIDIGTRTLAYSTDKEVNLLELADHVQNIEQEKRRLQRKMDRSRRATNPENYNPDGTFKRGVKLTRNKSKRYRRIQHQLAMIQHHQADIRKQQHNELANYLLTLGDCFFVENMSYCDLVHRANKTEISEKTGRYKRKKRFGKSIANKAPAMLITMLKQKCQSRGLKGVKEVDTHVRASQYNHQTDTCIEKALENRWNVMPDGERIQRDLYSAFLLQHCKQGLRNIIGRN

SEQ ID NO: 2032 - protein, 511 aa, unidentified
  REGION 1..511: note = Description of Unknown: uncultivated organism sequence
  REGION 1..511: note = Category: MG81 effectors
  REGION 1..511: note = Description: MG81-310 effector
MGKSSTDTCCLTLPLKLEKWQEDRLAKRFEIARQIYNTMVRAELKRLRQVEQSPQYRSNKKAIQALDWKNTADKPKLKTLYRERDKLLKGGGFTEYGFKSDIKNFYKHFAENIGSSVAVHGIAPQVWAAFERVLFKKEGKKVHFKKTGGIRSLRGYSVTGKSGGVEIIFRGSYIEWKGLNLPLKLSPDNAYETEMLSYRVKYVRILRKPGKTRDRWYAQLSLEGKPAIKRNPASGNPVHPVGQGAVGLDIGPQTLAYAAEKEANLVELADRVQNIEREKHLLQRKMDRSRRAANPDNYAENGTIRRGVKLTHNKSKRYLRLQRELCYLQHCQAETRKRQHTELANHLLSLGSCFYVEDMAWPSLTHRAKKTEISDKTGRIKRKKRFGKSIANKAPAALINILRTKCVSLGIPGVVEVPTSLKASQYNHQSKEYTPKPLSQRWNDMPDGSQIQRDLYSAFLLQHYDPQSGNFDQASLEADYPQFVQLHNQSIQRLLTVPKAPSSMGIRRSVS

SEQ ID NO: 2033 - protein, 512 aa, unidentified
  REGION 1..512: note = Description of Unknown: uncultivated organism sequence
  REGION 1..512: note = Category: MG81 effectors
  REGION 1..512: note = Description: MG81-311 effector
MKKSSTDTCCLTLPLKLEKWQEDRLAKRFEIARQLYNTLVHAELKRLVQIKRTAEYLENEQKIRALDRNNPADRAKLQELYKEQRKSLKTAGFTDYSFTTDMGKYYKHFRDNIGSSVAVHGIAPQVWAAFDKVLFKKGGKKVHYKKPGEVNSVQGYSRTGKSGGTEIMFRGPYIEWKGLKLPLKLSPDNAYETDMLQRRVKLVRLVRRPGKRRDRWYAQLVLEGKPAIKADPVTGKAVHPIGSGPVGLDIGPQTLAYSAAGAAGLVELADRVQNIEQEKHCLQRKMDRSRRATNPDNYAEDGTIRRGVKLTHNKSKRYRRSQQELKYLQRRQAEIRKLQHIQLANHLLSLGDHFYVEKMEWSSLTHRAKKTVISEKTGKPRSKKRFGKSIANKAPAMLIEILRQKCKSLGLPNVVEINPADIKASQYNHLTGEYVKKSLSRRWNEMQDGEHLQRDLYSAFLLQHYDSMSKALDLDSLARDYPAFVQYHHREIERLHALPKTPASMGIRRSIA

SEQ ID NO: 2034 - protein, 534 aa, unidentified
  REGION 1..534: note = Description of Unknown: uncultivated organism sequence
  REGION 1..534: note = Category: MG81 effectors
  REGION 1..534: note = Description: MG81-312 effector
MGWKSKGRGGTLVKKSSTDTCCLTLPLKLEKWQSDRLEKRFEIGRQIYNTVVRAELKKLQQVERTPQYREIEQKLKEAKQEEAKELWKTRTQLLSKSGFSEYGFKSDMKYYYQHFKENIGSSVAVHGIASQAWTAFEKVLLSKDGKMVHFKKKRELSSLRGYSQAGKSGGIEIIFRGSYVEWKGLKLPLQLSPNNEYETEMLSKRVKYVRILRKDGKTKTHWYAQLALEGKPAVKRDSISGAPKHPVGHGVVGIDIGTRTLAYSTDSEVNLLELADRVQNIEQEKRRLQRKMDRSRRAMNPGNYKPDGSIKQGVKLTWNNSKRYKRIQHQYAMIQHHQADIRKQQHNELANYLLTLGDCFFVEDMDYRALTRKAKKTEISEKTGRYKRKKRFGKSIANKAPSMLIALLDQKCKSLNLEGVKKVDTAVKASQYNHQTDECKAKELKERWNIMPDGERIQRDLYSAFLLQHCRRDLPEYNRKKLQEAFGNELYRVFDREALQRDYPKFVEYHRKTIQRLSALPKTIASMGIRRIIS

SEQ ID NO: 2035 - protein, 512 aa, unidentified
  REGION 1..512: note = Description of Unknown: uncultivated organism sequence
  REGION 1..512: note = Category: MG81 effectors
  REGION 1..512: note = Description: MG81-313 effector
MPAKQKEDSNRCVLTLPLLTEPWQEHIIEKRFKIIEHLKNQLISIELRKLKNLQRTKAYKNLMKRIESVPKSERTALYKERNKMLKDAGFSQYTFMDDMAGKKSLMQKHFESHINVQIAHKAAIDVWSSFEKFLFGSGQMIHYQKRGTLSSVASKSPKTGMFYYSDENIFKWSGGGTKPKGGIILCLRVAPVKTNYEKEMVANNEIKYYRVVRKWMKTKYKYYLQITFAGKPADKHHEVSTDRVGIDIGTQTIAIASDKSVKLLELADKVNKNHIKKCELQRKLDRSRRYTNPDNFNPDGTVKRGTKGHKLKWNKSKHYIEIAGKIRELERKNADIRKYQHTCLANDILAMGNQIYIEPMNYKGLQKRAKETQVDEKGRYKKKKRFGKSLANKAPAMFVTILKTKAEQHGGEVYEVDIMSYRASQCDHTTGEYTKHGLNDRWRILGNGDKVQRDLYSAFLIKNSNKTHDEIDLDKCSKTYDNFKKLHDKEIENIRNEVILRKRRNISSYGIA

SEQ ID NO: 2036 - protein, 385 aa, unidentified
  REGION 1..385: note = Description of Unknown: uncultivated organism sequence
  REGION 1..385: note = Category: MG81 effectors
  REGION 1..385: note = Description: MG81-314 effector
MKTLKLRILDKHVPKLGQVASACNYVWNYVNALGFTHLQRTGKFFGAYDIALYTKGAGELLGLHSQTIQAITETYVKSRKQFCKAKLKWRTNRHDSKHKALGWIPFKKSAVKVLPSRQTGRKKRKTGIVLSLAKGCKLHIEVWDSYNLDLYQANTCELVQDSRGRWYACITVKDFPKTKCGTNKVGIDLGLKTAATTSNGDQLITKVTQAYAKALGTAQRAGNKARVKAINAKIRHTRQDLIHKFTTNLVKDSAVIVVGDVKSTAIIQPRKRDKPTNQQTTPRPHRKRMKLAKSVYDAGWFELKRQLEYKCKHAGCQLEIVSERMTTQTCSCCGNTTGSPKGRTGLGIREWTCGTCHTTHDRDINAARNILAVGLHRLDVGIPSL

SEQ ID NO: 2037 - protein, 532 aa, unidentified
  REGION 1..532: note = Description of Unknown: uncultivated organism sequence
  REGION 1..532: note = Category: MG81 effectors
  REGION 1..532: note = Description: MG81-315 effector
MILLANNNNNNNNNTDTCVLTLPLRVEKWQEDCLLKRFEAARRIYNSLLNFELKKLRQLERTVEYRQIQSVISSAYRSNTKDSLECKDAFKRREKLISANGISENGFKSDVKFFYKHFDGLIGSSVAVHCIAVQLWAAFDKYLSGSGKEIHFKRLGDISSLKGYSVKGKSGGCEIIFRGQYVEWTRKKKKLLLPLKIDPDNEYEREMLSRRVKYVRIIKKPGKNRLRWYAQLTLEGKPALKYSAGTGKPIHSVGKGNVGIDIGPQTVAYASDKEVALLELADRVTNIEHQKKKLQRKLDRSRRATNPDNYKPDGTIKRGVKLTRNKSKRYLKLQSKLAYIQHRQAEIRKLQHTCLANHMLTLGDRFFVEKMNWPGLAHRAKETSISEKTGRYKRKKRFGKSLANKAPAMFISILKRKCETLGLPGVVEVDTYSLKASQYNHLSDTYEKKSLSERWNYMPISDGSDSSKTKRIQRDLYSAFLLQHTIPQPCSFDKEALRIDYPNFVTMHDAEIHRLESLPKTVTSMGVRRSHS

SEQ ID NO: 2038 - protein, 511 aa, unidentified
  REGION 1..511: note = Description of Unknown: uncultivated organism sequence
  REGION 1..511: note = Category: MG81 effectors
  REGION 1..511: note = Description: MG81-316 effector
MKKSNTDTCCLTLPLKLEKWQEDRLAKRFEIARQIYNTMVHAELKKLRNIENSQPYRQIQKQIEALNWKNQNDKARLKSLYNDRNKLLNTIGFSEYGFKADIKYYYKHFNDNIGSSVAVHGIAPQVWAAFEKMLFHKEGKKVHYKKKDDIHSLHGYSVTGKSGGVEIIFRKTYIEWKGLKLPLKRSPDNAYETEMLGRRVKYVRLLRKPGKRKDCWYAQLSLEGKPAIKRDPESGERRHSIGWGAVGLDIGPQTLAYSACGAADLVELADQVQNIEQMKRRLQRKLDRSRRATNPDNYADNGTIRRGVKLTHNKSNRYRRTQRELRYLQHCQAEIRKRQHIELANHLLALGDCFYVEDMAWPSLTHRAKETAISEKTGRIKRKKRFGKSVANKAPATLIGILEQKCNSLGLPGVMKVPTSLRASQYNHQSGEYTSKPLSQRWNNMPDGERIQRDLYSAFLLQHYDPKAGNFDSALLQQDYPQFVQYHHRAIQRLSTVPKTLSSMGIQRSLR

SEQ ID NO: 2039 - protein, 398 aa, unidentified
  REGION 1..398: note = Description of Unknown: uncultivated organism sequence
  REGION 1..398: note = Category: MG81 effectors
  REGION 1..398: note = Description: MG81-317 effector
MKTLKLKVRKEAYNWLNAAAKETNTVWNWTKETRLKALNFNYDCNHEFHYNEETGRYQRKILSRGTWLSNEDKWAPKTSIWLSHYDLTKLTKGATKDDLFKHLPMQSINLVVKEYVRKSIQFKKSELRWRKSMGSKRNLGWIPFQAQGLSRCKNKKYIKFAGKTFRVFEHNRLNEGKWCDGCFSEDSVGDWWLCIPIKTTQSENKIAPGEAVGIDLGIRKVATTSKPSNSLATIRSYRDTEDKIKEAQRRGHKRQAKRLHRKAANQRKDILHKYSTKLVDGYQEIYIGDLNSKFLSGSKLAKSASDNAIGMLKDMVQYKGERAGRTVKIVNERYTTQDCSVCGSRSGPKGQLDIREWTCTECGTTHDRDVNAAKNILKLGKLTFVRDNSATTTPCCKK

SEQ ID NO: 2040 - protein, 538 aa, unidentified
  REGION 1..538: note = Description of Unknown: uncultivated organism sequence
  REGION 1..538: note = Category: MG81 effectors
  REGION 1..538: note = Description: MG81-318 effector
MDNEEKKEDGATCCLTLPLKLEKWQSDHLEKRFEIARQLYNTLVHAELKKKCQVERMPEYQEIMKMIDTASNQKEKWALEKKRKAFLEENGFSRNAFKADMEKYYKHFNDNIGANVALHGITAQVWIAFDKVFVDNYKQKGKVHFKKPGELCSVQGYSQKKSGGKEIMFREDRIIWNQQGNRDRKKVKREFLLKLSPDNPYEAEMLKRHVKFVRILRKDGKTKPHWYAQLVLEGKPAVKRDPASGAPKHPIGHGVVGIDIGTRTLAYSTDKEVNLLELADRVQNIEQEKRRLQRKMDRSRRAMNPENYNSDGTFKRGVKLTRNKSKRYRRIQHQLAMIQHHQADIRKQQHNELANYLLTLGDCFFVENMSYCDLVHRANKTEISEKTGRYKRKKRFGKSIANKAPAMLITMLKQKCQSRGLEGVKEVDTHVRASQYNHQTDTCIEKALENRWNVMPDGERIQRDLYSAFLLQHCKQGLPEYNRKELKKEFGEELYRVFDREALQRDYPQFVAYHHMTIQRLSELPHTIASMGIRRSIS

SEQ ID NO: 2041 - protein, 354 aa, unidentified
  REGION 1..354: note = Description of Unknown: uncultivated organism sequence
  REGION 1..354: note = Category: MG81 effectors
  REGION 1..354: note = Description: MG81-319 effector
MKTLKIRIKDSNQTKLLCQLASEVNLVWNYCNELGFKYLQRTGKFLSAYDIDKYTAGASKECGLHSQTIQAISNEYVTRRKQFKKSKLSWRVSNPKSAKCSLGWIPFKKSAIKYGKGFIQYGKNIFKLWDSYNLSQFDIYTGSFVQDSRGRWYVCVTVDTPKQLPNQATKAIGIDLGLKDLATCSDGTKISNPKYYSHYQAKLGKSQRANKKRLVQTLHAKIKNSRKDYLQKQSTQLVKDNGLIIVGSLSANKLTKTKMAKSVNDTGFSAFKTMLKYKCENAGVWFVEVSENYTTQICSCCGEISANSPKGRINLGIREWTCSLCNATHDRDVNASKNILRLGHQTLAGGIPSL

SEQ ID NO: 2042 - protein, 511 aa, unidentified
  REGION 1..511: note = Description of Unknown: uncultivated organism sequence
  REGION 1..511: note = Category: MG81 effectors
  REGION 1..511: note = Description: MG81-320 effector
MKKSNTDTCCLTLPLKLEKWQEDRLAKRFEIARKIYNTMVHAELKKLRNIENSQPYRQIQKQIEALNWKNQNDKARLKTLYNDRNKLLNTIGFSEYGFKADIKYYYKHFNDNIGSSVAVHGIAPQVWAAFEKMLFHKEGKKVHYKKKDDIHSLHGYSVTGKSGGVEIIFRKTYIEWKGLKLPLKRSPDNAYETEMLGRRVKYVRLLRKPGKRKDCWYAQLSLEGKPAIKRDPESGKRRHSIGRGAVGLDIGPQTLAYSACGAADLVELADQVQNIEQMKRRLQRKLDRSRRATNPDNYADNGTIRRGVKLTHNKSNRYRRTQRELRYLQHCQAEIRKRQHIELANHLLALGDCFYVEDMAWPSLTHRAKETAISEKTGKIKRKKRFGKSVANKAPATLIGILEQKCNSLGLPGVIKVPTSLRASQYNHQSGEYTSKPLSQRWNNMPDGERIQRDLYSAFLLQHYDPQAGNFDSALLQQDYPQFVQYHHRAIQRLSTVPKTLSSMGIQRSLR

SEQ ID NO: 2043 - protein, 341 aa, unidentified
  REGION 1..341: note = Description of Unknown: uncultivated organism sequence
  REGION 1..341: note = Category: MG81 effectors
  REGION 1..341: note = Description: MG81-321 effector
MLPLKIDPDNEYEREMLSRRVKYVRIIKKPGKNRLRWYAQLTLEGKPALKYSAGTGKPIHSVGKGNVGIDIGPQTVAYASDKEVALLELADRVTNIEHQKKKLQRKLDRSRRATNPDNYKPDGTIKRGVKLTRNKSKRYLKLQSKLAYIQHRQAEIRKLQHTCLANHMLTLGDRFFVEKMNWPGLAHRAKETSISEKTGRYKRKKRFGKSLANKAPAMFISILKRKCETLGLPGVVEVDTFRLKASQYNHLSDTYEKKSLSERWNYMPISDGSDSSKTKRIQRDLYSAFLLQHTIPQPCSFDKEALRIDYPNFVTMHDAEIHRLESLPKTITSMGVRRSHS

SEQ ID NO: 2044 - protein, 511 aa, unidentified
  REGION 1..511: note = Description of Unknown: uncultivated organism sequence
  REGION 1..511: note = Category: MG81 effectors
  REGION 1..511: note = Description: MG81-322 effector
MGKSSTDTCCLTLPLKLEKWQEDRLAKRFEIARQIYNTMVRAELKKLDRVKQLPEYRKNQKEIQALDWKNSADKQRLKELYGNQRKILQKQGFTEYGFKADSKDYYKHFIENIGSSVATHGIAPQVWNAFDKMLFQKDGKVVHFKRYGDVHSLKGGSVAHKSGGAEIMFRKTYIEWKGLKLPLKLSPDNAYEAEMLSYHVKYVRILRTRGKTKDRWYAQLSLEGKPAVKYDSNTGKPVHPVGKGAVGLDIGPQTLAYVAANEANLVELADQVQNIEQEKRRLQRKLDRSRRATNPDNYNENGTIRRGVKLTHNKSKRYCKLQKELSWIQHCQAETRKRQHIALANHLLSLGDCFYVEPMAWPSLTHRAKKTEVSEKTGRIKRKKRFGKSVANKAPASLIGILKLKCISLGLTGVVEVPKLLKASQYNHQSKDYAPKSLSQRWNDMPDGNRIQRDLYSAFLLQHYNSQLENFNQETLERDYPQFVRLHNQTIQRLSALPKTPSSMGIRRSVS

SEQ ID NO: 2045 - protein, 533 aa, unidentified
  REGION 1..533: note = Description of Unknown: uncultivated organism sequence
  REGION 1..533: note = Category: MG81 effectors
  REGION 1..533: note = Description: MG81-323 effector
MILLANNNNNNNNNNTDTCVLTLPLRVEKWQEDCLLKRFEAARRIYNSLLNFELKKLRQLERTVEYRQIQSVISSAYRSNTKDSLECKDAFKRRKKLTDENGISEYGFKSDVKFFYKHFDGLIGSNVAVHCIAVQLWVAFDKYLSGSGKEIHFKRLGDISSLKGYSVKGKSGGCEIIFRGQYVEWTRKKKKLLLPLKIDPDNEYEREMLSRRVKYVRIIKKPGKNRLRWYAQLTLEGKPALKYSAGTGKPIHSVGKGNVGIDIGPQTVAYASDKEVALLELADRVTNIEHQKKKLQRKLDRSRRATNPDNYKPDGTIKRGVKLTRNKSKRYLKLQSKLAYIQHRQAEIRKLQHTCLANHMLTLGDRFFVEKMNWPGLAHRAKETSISEKTGRYKRKKRFGKSLANKAPAMFISILKRKCETLGLPGVVEVDTYSLKASQYNHLSDTYEKKSLSERWNYMPISDGSDSSKTKRIQRDLYSAFLLQHTIPQPCSFDKEALRIDYPNFVTMHDAEIHRLESLPKTVTSMGVRRSHS

SEQ ID NO: 2046 - protein, 536 aa, unidentified
  REGION 1..536: note = Description of Unknown: uncultivated organism sequence
  REGION 1..536: note = Category: MG81 effectors
  REGION 1..536: note = Description: MG81-324 effector
MILLANNNNNNNNNNNNNTDTCVLTLPLRVEKWQEDCLLKRFEAARRIYNSLLNFELKKLRQLERTVEYRQIQSVISSAYRSNTKDSPECKDAFKRRKKLTDENGISEYGFKSDVKFFYKHFDGLIGSSVAVHCIAVQLWAAFDKYLRGSGKEIHFKRLGDISSLKGYSVKGKSGGCEIIFRGQYVEWTRKKKKLLLPLKIDPDNEYEREMLSRRVKYVRIIKKPGKNRLRWYAQLTLEGKPALKYSAETGKPIHSVGKGNVGIDIGPQTVAYASDKEVALLELADRVTNIEHQKKKLQRKLDRSRRATNPDNYKPDGTIKRGVKLTRNKSKRYLKLQSKLAYIQHRQAEIRKLQHTCLANHMLTLGDRFFVEKMNWPGLAHRAKETSISEKTGRYKRKKRFGKSLANKAPAMFISILKRKCETLGLLGVVEVDTFRLRASQYNHLSDTYEKKSLSERWNYMPISDGSDSSKTKRIQRDLYSAFLLQHTIPQPCSFDKEALRIDYPNFVTMHDAEIHRLESLPKTVTSMGVRRSHS

SEQ ID NO: 2047 - protein, 528 aa, unidentified
  REGION 1..528: note = Description of Unknown: uncultivated organism sequence
  REGION 1..528: note = Category: MG81 effectors
  REGION 1..528: note = Description: MG81-325 effector
MILLAKNNNNTDTCVLTLPLRVEKWQEDCLLKRFEAARRIYNSLLNFELKKLRQLERTVEYRQIQSVISSAYRSNTKDSPECKDAFKRREKLISANGISKSGFKSDVKFFYKHFDGLIGSNVAVHCIAVQLWAAFDKYLSGSGKEIHFKRLGDISSLKGYSVKGKSGGREIIFRGQYIEWTRKKKKLLLPLKIDPDNEYEREMLSRRVKYVRIIKKPGKNRLRWYAQLTLEGKPALKYSAETGKPIHSVGKGDVGIDIGPQTVAYASDKEVALLELADRVTNIEHQKKKLQRKLDRSRRATNPDNYKPDGTIKRGVKLTRNKSKRYLKLQSKLAYIQHRQAEIRKLQHTCLANHMLTLGDRFFVEKMNWPGLAHRAKETSISEKTGRYKRKKRFGKSLANKAPAMFISILKRKCETLGLPGVVEVDTFRLRASQYNHLSDTYEKKSLSERWNYMPISDGSDSSKTKRIQRDLYSAFLLQHTIPQPCSFDKEALRIDYPNFVTMHDAEIHRLESLPKTVTSMGVRRSHS

SEQ ID NO: 2048 - protein, 534 aa, unidentified
  REGION 1..534: note = Description of Unknown: uncultivated organism sequence
  REGION 1..534: note = Category: MG81 effectors
  REGION 1..534: note = Description: MG81-326 effector
MILLANNNNNNNNNNNTDTCVLTLPLRVEKWQEDCLLKRFEAARRIYNSLLNFELKKLRQLERTVEYRQIQSVISSAYRSNTKDSLECKDAFKRREKLISANGISENGFKSDVKFFYKHFDGLIGSSVAVHCIAVQLWAAFDKYLSGSGKEIHFKRLGDISSLKGYSVKGKSGGLEIIFRGQYVEWTRKKKKLLLPLKIDPDNEYEREMLSRRVKYVRIIKKPGKNRLRWYAQLTLEGKPALKYSAETGKPIHSVGKGDVGIDIGPQTVAYASDKEVALLELADRVTNIEHQKKKLQRKLDRSRRATNPDNYKPDGTIKRGVKLTRNKSKRYLKLQSKLAYIQHRQAEIRKLQHTCLANHMLTLGDRFFVEKMNWPGLAHRAKETSISEKTGRYKRKKRFGKSLANKAPAMFISILKRKCETLGLPGVVEVDTYNLKASQYNHLSDTYEKKSLSERWNYMPISDGSDSSKTKRIQRDLYSAFLLQHTIPQPCSFDKEALRIDYPNFVTMHDAEIHRLESLPKTVTSMGVRRSHS

SEQ ID NO: 2049 - protein, 523 aa, unidentified
  REGION 1..523: note = Description of Unknown: uncultivated organism sequence
  REGION 1..523: note = Category: MG81 effectors
  REGION 1..523: note = Description: MG81-327 effector
MPTKQKEGGNRCVLTLPLLTEPWQEHIIEKRFKIIEHLKNQLISIELRKLKNLQRTKAYKNLIKQIESVPKSERTVLYKERNKMLKDAGFSQYTFMDDMAGKKSLMQKHFESHINVQIAHKAAIDVWSSFEKFLFGSGQMIHYQKRGTLKSIASKSPKNGMHYFPESNTFKWSGGKQKKIGQKGEQKKVSIKPISLCLRVSPLKTDYEKEMVANNEIKYYRVVRKWMKTKYKYYLQITFAGKPADKHREISTGRVGIDIGTQTIAIASDKSVKLLELADKVNKNHIKKCELQRKLDRSRRYTNPDNFNPDGTVRRGTKGHKLKWNKSKHYLEIAGKIRELERKNSDIRKYQHTCLANDILAMGNQIYIEPMNYKGLQKKAKETQVDEKGRYKKKKRFGKSLANKAPSMFVTILKTKAEQHGGEVYEVDIMSYRASQCDHTTGEYTKHGLNDRWRILGNGDKVQRDLYSAFLIKNSNKTHDEIDLDKCSKTYDNFKKLHDTEIENIRNEVKLRERKNISSYGIT

SEQ ID NO: 2050 - protein, 512 aa, unidentified
  REGION 1..512: note = Description of Unknown: uncultivated organism sequence
  REGION 1..512: note = Category: MG81 effectors
  REGION 1..512: note = Description: MG81-328 effector
MPTKQKEDSNRCVLTLPLLTEPWQEHIIEKRFKIIEHLKNQLISIELRKLKNLQRTKAYKNLIKQIESVPKSERTALYKERNKMLKDAGFSQYTFMDDMAGKKSLMQKHFESHINVQIAHKAAIDVWSSFEKFLFGTGQIVHYQKRGTLSSVASKSPKTGMFYYSDENIFKWSGGGTKPKGGIILCLRVAPVKTNYEKEMVANNEIKYYRVVRKWMKTKYKYYLQITFAGKPADKHHEVSTGRVGIDIGTQTIAIASDKSVKLLELADKVNKNHIKKCELQRKLDRSRRYTNPDNFNPDGTVKRGTKAHKLKWNKSKHYIEIAGKIRELERKNADIRKYQHTCLANDILAMGNQIYIEPMNYKGLQKRAKETQVDEKGRYKKKKRFGKSLANKAPAMFVTILKTKAEQHGGEVYEVDIMSYRASQCDHTTGEYTKHGLNDRWRILGNGDKVQRDLYSAFLIKNSNKTHDEIDLDKCSKTYDSFKKLHDKEIENIRNEVKLRERKNISSYGIA

SEQ ID NO: 2051 - protein, 534 aa, unidentified
  REGION 1..534: note = Description of Unknown: uncultivated organism sequence
  REGION 1..534: note = Category: MG81 effectors
  REGION 1..534: note = Description: MG81-329 effector
MGWKSKGRGGKRVKRSSTDTCCLTLPLKLEKWQSDRLEKRFEIGRQIYNTIVHAELKKLRKLERTQQYQEIEQKLENAKQEETKELWKKKRQLLDQNGLSENHFKADMKYYYPHFKDNIASSVAVHGIASQAWTAFEKVLLSKDGKMVHFKKKGELSSLRGYSQAGKSGGIEIIFRGSYVEWKGLKLPLQLSPNNEYETEMLSKRVKYVRILRKDGKTKTHWYAQLALEGKPAVKRDSISGAPKHPVGHGVVGIDIGTRTLAYSADSKVDLIELADRVQNIEQEKMLLQRKLDRSRRATNPENYKPDGSIKQGVKLTWNNSKRYKRIQHQYAMIQHHQADIRKQQHNELANYLLTLGDCFFVEDMDYRALTRKAKKTEISEKTGRYKRKKRFGKSIANKAPSMLIALLDQKCKSLNLEGVKKVDTAVKASQYNHQTDECKAKELKERWNIMPDGERIQRDLYSAFLLQHCRRDLPEYNRKKLQETFGNELYRVFDREALQRDYPKFVEYHRETIQRLSALPKTIASMGIRRSIS

SEQ ID NO: 2052 - protein, 511 aa, unidentified
  REGION 1..511: note = Description of Unknown: uncultivated organism sequence
  REGION 1..511: note = Category: MG81 effectors
  REGION 1..511: note = Description: MG81-330 effector
MKKSNTDTCCLTLPLKLEKWQEDRLAKRFEIARQIYNTMVHAELKKLRNIENSQPYRQIQKQIEALNWKNKNDKARLKSLYNDRNKLLNTIGFSEYGFKADIKYYYKHFNDNIGSSVAVHGIAPQVWAAFEKMLFHKEGKKVHYKKKDDIHSLHGYSVTGKSGGVEIIFRKTYIEWKGLKLPLKRSPDNAYETEMLGRRVKYVRLLRKPGKRKDCWYAQLSLKGKPAIKRDPESGKRRHSIGRGAVGLDIGPQTLAYSACGAADLVELADQVQNIEQMKRRLQRKLDRSRRATNPDNYADNGTIRRGVKLTHNKSNRYRRTQRELRYLQHCQAEIRKRQHIELANHLLALGDCFYVEDMAWPSLTHRAKETAISEKTGRIKRKKRFGKSVANKAPATLIGILEQKCNSLGLPGVIKVPTSLRASQYNHQSGEYTSKPLSQRWNNMPDGERIQRDLYSAFLLQHYDPKAGNFDSALLQQDYPQFVQYHHRAIQRLSTVPKTLSSMGIQRSLR

SEQ ID NO: 2053 - protein, 534 aa, unidentified
  REGION 1..534: note = Description of Unknown: uncultivated organism sequence
  REGION 1..534: note = Category: MG81 effectors
  REGION 1..534: note = Description: MG81-331 effector
MGRKSTGRGGTLVKKSSTDTCCLTLPLKLEKWQSDRLEKRFEIGRQIYNTVVRAELKKLQQVERTPQYREIEQKLKGAKQEEAKELWKKRTQLLSKSGFSEYGFKSDMKYYYQHFKENIGSSVAVHGIASQVWTAFEKVLLSKDGKMVHFKKKGELSSLRGYSQAGKSGGIEIIFRGSYVEWKGLKLPLQLSPNNEYETEMLSKRVKYVRILRKDGKTKTHWYAQLALEGKPAVKRDSISGAPKHPVGHGVVGIDIGTRTLAYSTDSEVNLLELADRVQNIEQEKRRLQRKMDRSRRAMNPGNYKPDGSIKQGVKLTWNNSKRYKRIQHQYAMIQHHQADIRKQQHNELANYLLTLGDCFFVENMSYCDLAHRANKTEISEKTGRYKRKKRFGKSIANKAPAMLITMLKQKCQSRGLEGVKEVDTHVCASQYNHQTDTCIKKALENRWNIMPDGERIQRDLYSAFLLQHCRRDLPEYNRKELQKEFGEELYRVFDREALQRDYPQFVAYHHMTIQRLSELPHTIPSMGIRRIIS

SEQ ID NO: 2054 - protein, 511 aa, unidentified
  REGION 1..511: note = Description of Unknown: uncultivated organism sequence
  REGION 1..511: note = Category: MG81 effectors
  REGION 1..511: note = Description: MG81-332 effector
MAKCSTDTCCLTLPLRLEKWQEDRLAKRFEIARQIYNTMVRAELKKLRAIEQSEPYKANQEKIQALDWKTQADKQALKALYKERDKRLRDGGFSEYGFKSDIKNYYKHFNNNIGSSVAVHGIAPQVWAAFEKMLFKKEGKKVHFKKKGDIRSLRGYSVTGKSGGVEIIFRETYIEWKGLKLPLKLSPDNIYETQMLSYRVKYVRLLRKPGKRKDRWYAQLSLEGKPVIKYNPKTGEVRHPIGKGAVGLDIGPQTLAYSAATGADLVELANQVQNVEQEKRRLQRKLDRSRRATNPGNYADDGTIRRGIALTHNKSKRYLRTQQELKYLQHQQAEIRKRQHTELANHLLSLGDCFYVEKMVWTSLTHRAKETEISEKTGKIKRKKRFGKSVANKAPATLIGILQRKSAALGIPGVIEVPTSVKASQYNHQSGTYTPKPLSQRWNNMPDGERIQRDLYSAFLLQHYDPQTNTFDTNSLHQDYPQFVQYHHDAVLRLYAMPKTPSSMGIKRSLR

SEQ ID NO: 2055 - protein, 511 aa, unidentified
  REGION 1..511: note = Description of Unknown: uncultivated organism sequence
  REGION 1..511: note = Category: MG81 effectors
  REGION 1..511: note = Description: MG81-333 effector
MGKSSTDTCCLTLPLKLEKWQEDRLAKRFEIARQIYNTMVRAELKKLDRVKQLPEYRKNQKEIQALDGKNSADRARLKELRANQNRILQKQGFTEYGFKADSKDYYKHFIENIGSSVATHGIAPQVWNAFDKMLFQKDGKVVHFKRYGDVHSLKGGSVAHKSGGAEIMFRKTYIEWKGLKLPLKLSPNNAYEAEMLSYRVKYVRILRTRGKTKDRWYAQLSLEGKPAVKYDSNTGKPVHPVGRGAVGLDIGPQTLAYAAANEANLVELADQVQNIEQEKRRLQRKLDRSRRATNPDNYNENGTIRRGVKLTHNKSKRYCKLQKELSWIQHCQAETRKRQHIALANHLLSLGDCFYVEPMAWPSLTHRAKKTEVSEETGRIKRKKRFGKSVANKAPASLIGILRLKCISLGLTGVVEVPMLLRASQYNHQSKDYAKKSLSQRWNDMPDGNRIQRDLYSAFLLQHYNSQLENFDQETLERDYPQFVRLHNQTIQRLSALPKTPSSMGIRRSVS

SEQ ID NO: 2056 - protein, 512 aa, unidentified
  REGION 1..512: note = Description of Unknown: uncultivated organism sequence
  REGION 1..512: note = Category: MG81 effectors
  REGION 1..512: note = Description: MG81-334 effector
MPTKQKEDSNRCVLTLPLLTEPWQEHIIEKRFKIIEHLKNQLISIELRKLKNLQRTKAYKNLMKRIESVPKSERTALYKERNKMLKDAGFSQYTFMDDMAGKKSLMQKHFESHINVQIAHKAAIDVWSSFEKFLFGTGQIVHYQKRGTLSSVASKSPKTGMFYYSDENIFKWSGGGTKPKGGIILCLRVASVKTNYEKEMVANNEIKYYRVVRKWMKTKYKYYLQITFAGKPADKHREISTGRVGIDIGTQTIAIASDKSVKLLELADKVNKNHIKKCELQRKLDRSRRYTNPDNFNPDGTVKRGTKGHKLKWNKSKHYLEIAGKIRELERKNTDIRKYQHTCLANDILAMGNQIYIEPMNYKGLQKRAKETQVDEKGRYKKKKRFGKSLANKAPAMFVTILKTKAEQHGGEVYEVDIMSYRASQCDHTTGEYTKHGLNDRWRILGNGDKVQRDLYSAFLIKNSNKTHDEIDLDKCSKTYDSFKKLHDKEIENIRNEVILRKRRNISSYGIA

SEQ ID NO: 2057 - protein, 512 aa, unidentified
  REGION 1..512: note = Description of Unknown: uncultivated organism sequence
  REGION 1..512: note = Category: MG81 effectors
  REGION 1..512: note = Description: MG81-335 effector
MKKSSTDTCCLTLPLKLEKWQEGRLAKRFEIARQLYNTLVHAELKRLAQVKQTAEYRENERKIRTLDWNDPGDQAKLKGLYKERRKSLKTAGFTDYSFTTDMGKYYKHFRDNIGSSVAVHGIAPQVWAAFDKLLFKKGGKKVHYKKPGEVNSVQGYSRTGKSGGTEIMFRGPYIEWKGLKLPLKLSPDNAYETDMLQRRVKLVRLVRRPGKRRDRWYAQLVLEGKPAIKADPVTGKAVHPIGSGPVGLDIGPQTLAYSAAGAAGLVELADRVQNIEQEKRCLQRKMGRSRRATNPDNYAEDGTIRRGVKLTHNKSKRYRRSQQELKYLQRRQAEIRKLQHIQLANHLLSLGDHFYVEKMEWSSLTHRAKKTVISEKTGKPRSKKRFGKSIANKAPAMLIEILRQKCKSLGLPNVVEINPVDIKASQYNHLTGEYVKKSLSRRWNEMQDGEHLQRDLYSAFLLQHYDSMSKALDLDSLARDYPAFVQYHHQEIERLHALPKTPSSMGIRRSIA

SEQ ID NO: 2058 - protein, 536 aa, unidentified
  REGION 1..536: note = Description of Unknown: uncultivated organism sequence
  REGION 1..536: note = Category: MG81 effectors
  REGION 1..536: note = Description: MG81-336 effector
MDNVEKEKDGATCCLTLPLKLEKWQSDHLEKRFEIARQLYNTLVHAELKRIHRIERMPEYREIERQIEATTDKKEKWALKNQKKQFLRKNGINRNTFTTDMKRLYKHFNDNIGSNVAQHGIVSQVLTAFEKVYIENQSGEVHFKKPGDLRSVQGYSQKKSGGVEIMFREGKIIWNQQGNNDRKGVAREFPLKLSPDNSYEAEMLKKHVKFVRILRNEGKTKPHWYAQLVLEGKPAIKRDPASGAPKHSVGHGAVGIDIGTRTLAYSADSKVDLIELADRVQNIEQEKLLLQRKLDRSRRATNPENYKPDGTIKKGVKLTRNKSKRYRKIQHQLAMLQHRQADIRKRQHNELANYLLTLGDCFFVEDMDYRALTRKAKKTEISEKTGRYKRKKRFGKSIANKAPSMLIALLDQKCKSLNLEGVKKVDTAVKASQYNHQTDECKAKELKERWNIMPDGERIQRDLYSAFLLQHCRRDLPEYNRKKLQEAFGNELYRVFDREALQRDYPKFVEYHRKTIQRLSALPKTIASMGIRRIIS

SEQ ID NO: 2059 - protein, 512 aa, unidentified
  REGION 1..512: note = Description of Unknown: uncultivated organism sequence
  REGION 1..512: note = Category: MG81 effectors
  REGION 1..512: note = Description: MG81-337 effector
MKKSSTDTCCLTLPLKLEKWQEDRLAKRFEIARQLYNTLVHAELKRLVQIKRTAEYLENEQKIRALDRNNPADRAKLQELYKEQRKSLKTAGFTDYSFTTDMGKYYKHFRDNIGSSVAVHGIAPQVWAAFDKLLFKKGGKKVHYKKPGEVNSVQGYSRTGKSGGTEIMFRGPYIEWKGLKLPLKLSPDNAYETDMLQRRVKLVRLVRRPGKRRDRWYAQLVLEGKPAIKADPVTGKAVHPIGSGPVGLDIGPQTLAYSASGAAGLVELADRVQNIEQEKRRLQRKMDRSRRATNPDNYAEDGTIRRGVKLTHYKSKRYRRSQQELKYLQHRQAEIRKLQHIQFANHLLSLGDHFYVEKMEWSSLTHRAKETVISEKTGKPRSKRRFGKFIANKAPAMLIEILRQKCKSLGLPNVVEINPADIKASQYNHLTGEYVKKSLSRRWNEMQDGEHLQRDLYSAFLLQHYDSMSKALDLDSLARDYPAFVQYHHREIERLHALPKTPASMGIRRSIA

SEQ ID NO: 2060 - protein, 536 aa, unidentified
  REGION 1..536: note = Description of Unknown: uncultivated organism sequence
  REGION 1..536: note = Category: MG81 effectors
  REGION 1..536: note = Description: MG81-338 effector
MVNDDYNKVLKQFHKLSNRHILVAETDMSCSDIQKVVKLSDRIRKAGNELIGLMKKNYDQLMRTKRYRGLLKLYGSTKNKQKRKMFADQLNEMQKQYNVTWDYCRKSMIHIGKKYSIDAVFALTKAEDVWHGVEKCLYGNGKTLHFSKHGDLPCIRAKQINRGIPISAKNNQLQFKLGKSVFGIQIKDRFQTDEVNAVLDYLAAPEIADCKAVQTLLEEACCISTYRPCYATLVPKLIRGKYRVYLHLAIEGRAKPKYDRFGNPRHKYGKGIIGADIGTQTVAYTSDTETGLKNLSDRGNSIQTSERLERLYYRAMDRSRRATNPQNYNDDGTVKQGKKTWNYSNHYKKLKAKHAELCRINAANRRLAINEDANHLRSIGDVFITEPKNAAKLMKRASKTTVNNKGKINKKKRFGKSIKNRCPGGFQTAVENKFKASGGTYIEVSNNYRASQYDHTADDYIKKKLSDRMYKLADGTLVQRDWYSSFLLYCYDFRTSDIDKDKCAAKFDKCYSMERELIEWIKTNKIKVLNSGIKIA

SEQ ID NO: 2061 - protein, 511 aa, unidentified
  REGION 1..511: note = Description of Unknown: uncultivated organism sequence
  REGION 1..511: note = Category: MG81 effectors
  REGION 1..511: note = Description: MG81-339 effector
MAQRHSTPTCCLTLPLQLEKWQEDRLIKRFEIAGKIYNALLNAELKKLHRLEQLPEYKEIQSQLKAYYQNNLPKTAAFKELNNRRSKLLSEHGFSEYAFKGDMKKFYKHFSSNIGSSVATHCIASQVWSAFEKRLFGGGKFVHFKKSGDIRSLKGFSSSRKSGGVEIMFRGDHIEWKGLLLRLKLDPDNQYESEMLSRRIKYVRIIRKPGKAKWRWYAQLSVEGLPAIKRNDETGEPVHPIGRGAVGIDIGPQTIAYVSQTEVALKELADRVQNIEHEKRLIQRKLDRSRRATNPANYADNGTIKRGVKLTRNKSKRYLKLQMELSFLQHKQAEIRKQQHINLANHLLSLGDCFYVEDMAWSSLARKAKETAVSEKTGKYKRKKRFGKSIANKAPASLISILDQKCTSLGLLGVIKVPTSVRASQYNHITKSYEKKTLSQRWNIMPDGRRIQRDIYSAFLLQHVTPQRDGFSDEALQQDYENFVSLHDSVFQQLRLMPKTIASMGIRRTYS

SEQ ID NO: 2062 - protein, 352 aa, unidentified
  REGION 1..352: note = Description of Unknown: uncultivated organism sequence
  REGION 1..352: note = Category: MG81 effectors
  REGION 1..352: note = Description: MG81-340 effector
MYTTLNYRIKDSNVSDTLNKWASDANRIWNMCNEINMISWQKFQRPMSGFDLGYSAKGMSKMMAIPQRSIGCICTEYATRTKQFKKRKLNWRSYKKNTGWIPFATQQMKCFSDGIFFNGQKFKLWDYKPFDEKTIKSGSFQQDARGRWYVSITVEIEASSEIPKTGKAVGIDLGLKSLVTLSDGTVYDRVNLTEMYAKKLATAQLAGNLMQVRNIHAKIKNTRKNFYHEISLAIVKNYDEIYIGNISSSKLIKTKMAKSVSDAAWYDFKFMLKYKAERAGKKFVEVNESFSTVTCSSCLERTGPSGLSALGVRSWICSHCGAAHDRDVNAAKNILRSGQCADLRVKGSSLKN

SEQ ID NO: 2063 - protein, 512 aa, unidentified
  REGION 1..512: note = Description of Unknown: uncultivated organism sequence
  REGION 1..512: note = Category: MG81 effectors
  REGION 1..512: note = Description: MG81-341 effector
MKKSNTDTCCLTLPLKLEKWQEDRLAKRFEIARQLYNTLVHAELKRLAQVKQTAEYRENERKIRALDWNDPGDQAKLKGLYKERRKSLKTAGFTDYSFTTDMGKYYKHFRDNIGSSVAVHGIAPQVWAAFDKLLFKKGGKKVHYKKPGEVNSVQGYSRTGKSGGTEIMFRGPYIEWKGLKLPLKLSPDNAYETDMLQRRVKLVRLVRRPGKRRDRWYAQLVLEAKPAIKADPVTGKAVHPIGSGPVGLDIGPQTLAYSAAGAAGLVELADRVQNIEQEKRRLQRKMDRSRRATNPDNYAEDGTIRRGVKLTHNKSKRYRRSQQELKYLQHRQAEIRKLQHIQFANHLLSLGDHFYVEKMEWSSLTHRAKKTVISEKTGKPRSKKRFGKSIANKAPAMLIEILRQKCKSLGLPNVVEINPADIKASQYNHLTGEYVKKSLSRRWNEMQDGEHLQRDLYSAFLLQHYDSMSKALDLDSLARDYPAFVQYHHREIERLHALPKTPSSMGIRRSIA

SEQ ID NO: 2064 - protein, 550 aa, unidentified
  REGION 1..550: note = Description of Unknown: uncultivated organism sequence
  REGION 1..550: note = Category: MG81 effectors
  REGION 1..550: note = Description: MG81-342 effector
MGWKSKGRGGTLVDNEEKKEDGATCCLTLPLKLEKWQSDHLEKRFEIARQLYNTLVHAELKKKCQVERMPEYQEIMKMIDTASNQKEKWALEKKRKAFLEENGFSRNAFKADMEKYYKHFNDNIGANVALHGITAQVWIAFDKVFVDNYKQKGKVHFKKPGELCSVQGYSQKKSGGKEIMFREDRIIWNQQGNRDRKKVKREFLLKLSPDNPYEAEMLKRHVKFVRILRKDGKTKPHWYAQLVLEGKPAVKRDPASGAPKHPIGHGVVGIDIGTRTLAYSTDKEVNLLELADRVQNIEQEKRRLQRKMDRSRRAMNPENYNSDGTFKRGVKLTRNKSKRYRRIQHQLAMIQHHQADIRKQQHNELANYLLTLGDCFFVENMSYCDLVHRANKTEISEKTGRYKRKKRFGKSIANKAPAMLITMLKQKCQSRGLEGVKEVDTHVRASQYNHQTDTCIEKALENRWNVMPDGERIQRDLYSAFLLQHCKQGLPEYNRKELKKEFGEELYRVFDREALQRDYPQFVAYHHMTIQRLSELPHTIASMGIRRSIS

SEQ ID NO: 2065 - protein, 524 aa, unidentified
  REGION 1..524: note = Description of Unknown: uncultivated organism sequence
  REGION 1..524: note = Category: MG81 effectors
  REGION 1..524: note = Description: MG81-343 effector
MAKNNNTDTCVLTLPLRVEKWQEDCLLKRFEAARRIYNSLLNFELKKLRQLERTVEYRQIQSVISSAYRSNTKDSPECKDAFKRREKLISANGISKSGFKSDVKFFYKHFDGLIGSNVAVHCIAVQLWAAFDKYLSGSGKEIHFKRLGDISSLKGYSVKGKSGGREIIFRGQYIEWTRKKKKLLLPLKIDPDNEYEREMLSRRVKYVRIIKKPGKNRLRWYAQLTLEGKPALKYSAETGKPIHSVGKGNVGIDIGPQTVAYASDKEVALLELADRVTNIEHQKKKLQRKLDRSRRATNPDNYKPDGTIKRGVKLTRNKSKRYLKLQSKLAYIQHRQAEIRKLQHTCLANHMLTLGDRFFVEKMNWPGLAHRAKETSISEKTGRYKRKKRFGKSLANKAPAMFISILKRKCETLGLPGVVEVDTYSLKASQYNHLSDTYEKKSLSERWNYMPISDGSDSSKTKRIQRDLYSAFLLQHTIPQPCSFDKEALRIDYPNFVIMHDAEIHRLESLPKTVTSMGVRRSHS

SEQ ID NO: 2066 - protein, 511 aa, unidentified
  REGION 1..511: note = Description of Unknown: uncultivated organism sequence
  REGION 1..511: note = Category: MG81 effectors
  REGION 1..511: note = Description: MG81-344 effector
MAARSKTDTCCLTLPLRLEKWQADRLAKRFHIAEQIYNAMLLSWIKKLRVVEQMPEYRAIQSQLQKLYEEDKQKTDAAKELFSRRKEILKKNGFSEYSFKTGIRKYYAHFKENIASNVATHCIASQVWDAFSKKLFGNGGRLHFKRAGDIHSLRGYSKSGESGGVEIIFRGTYIEWNGLRLPLKLDPQNPYEAEMLAKRVKYVRILRTPGKSIDHWYAQLALEGKPTVKRNAATGEPVHPSGRGAVGIDIGPRTIAYVSENEVGLRELADQVENIERDKRRLQRKLDRSRRATNPDNYAPDGTIKRGIKHTHNKSSRYRRMQKELSLLQHRQALIRKRQHTELANHLLSLGDCFYVEDMPWKGLARRTKETTVSPTTGRYRRKKRFGKSISNKAPGTLILILEQKCKSRGVSGVIRVPTNIKASQYNHMTDTYKPKPLSQRWNDMPDGKRIQRDLYSAFLLQHVTPELDGFERTKLIEDYDGFIHLHDKEIHELTLAPKTIASMGISRTRS

SEQ ID NO: 2067 - protein, 349 aa, unidentified
  REGION 1..349: note = Description of Unknown: uncultivated organism sequence
  REGION 1..349: note = Category: MG81 effectors
  REGION 1..349: note = Description: MG81-345 effector
MIQRQIKLRLKPKQEALLNDWLWQCTGLFNWAIRKIELDAQGGVYYTKQGFQNILAGHSRKMGMPSHTMQAMLTQAYIGWQRCFKKLAKKPRLKGMRNKLNSIPFPDPLKQPVQNKIKVPGLGQVRFHKQSLPDGKIKCGRIIKRASGWYLALTIDAEPNIKHTFKAKNNRVVGIDPGFKDVIALSDGEKKKATLEYNQGLQRLAQAQRGHDKKLVARLHERIANRKKDRNHKLSRHLVETCELIAFSKDNIKGIQRKFGKSVANANIYQLRQMIDYKSSSCDRRYVEVDGKYSTMTCSACGSRTGPTGIAGLRVRYWTCGCGTKHDRDINAAINTLNTAVGSTVELAA

SEQ ID NO: 2068 - protein, 512 aa, unidentified
  REGION 1..512: note = Description of Unknown: uncultivated organism sequence
  REGION 1..512: note = Category: MG81 effectors
  REGION 1..512: note = Description: MG81-346 effector
MKKSSTDTCCLTLPLKLEKWQEDRLAKRFEIARQLYNTLVHAELKRLVQIKRTAEYRENERKIRTLDWNNPAHRTELEKLYEERRKSLKKAGFTDNSFTTDMGKYYKHFRDNIGSSVAVHGIAPQVWAAFDKLLFKKGGKKVHCKRPGEVNSVQGYSRTGKSGGREIMFRGAYIEWKGLKLPLKLSPDNAYETDMLQRRVKLVRLVRRPGKRRDRWYAQLVLEGKPAIKADPVTGKAVHPIGSGPVGLDIGPQTLAYSAAGVAGLVELADRVQNIEQEKRCLQRKMDRSRRATNPDNYAEDGTIRRGVKLTHNKSKRYRRNQQELKYLQHRQAEIRKLQHIQLANHLLSLGDHFYVEKMEWSSLTRRAKKTVISEKTGKPRSKKRFGKSIANKAPAMLIEILRQKCKSLGLPNVVEINPADIKASQYNHLTGEYVKKSLSRRWNDMQDGEHLQRDLYSAFLLQHYDSMSKALDLDSLSRDYPAFVQYHHQEIERLHALPKTPASMGIRRSIA

SEQ ID NO: 2069 - protein, 536 aa, unidentified
  REGION 1..536: note = Description of Unknown: uncultivated organism sequence
  REGION 1..536: note = Category: MG81 effectors
  REGION 1..536: note = Description: MG81-347 effector
MVNDDYNKVLKQFHKLSNRHILVAETDMSCSDIQKVVKLSDRIRKAGNELIGLMKKNYDQLMRTKRYRGLLKLYGSTKNKQKRKMFADQLNEMQKQYNVTWDYCRKSMIHIGKKYSIDAVFALTKAEDVWHGVEKCLYGNGKTLHFSKHGDLPCIRAKQINRGIPISAKNNQLQFKLGKSVFGIQIKDRFQTDEVNAVLDYLAAPEIADCKAVQTLLEEACCISTYRPCYATLVPKLIRGKYRVYLHLAIEGRAKPKYDRFGNPRHKYGKGIIGADIGTQTVAYTSDTETGLKNLSDRGNSIQTSERLERLYYRAMDRSRRATNPQNYNDDGTVKQGKKTWNYSNHYKKLKAKHAELCRINVANRRLAINEDANHLRSIGDVFITEPKNAAKLMKRASKTTVNNKGKINKKKRFGKSIKNRCPGGFQTAVENKFKASGGTYIEVSNNYRASQYDHTADDYIKKKLSDRMYKLADGTLVQRDWYSSFLLYCYDFRTSDIDKDKCAAKFDKCYSMERELIEWIKTNKIKVLNSGIKIA

SEQ ID NO: 2070 - protein, 538 aa, unidentified
  REGION 1..538: note = Description of Unknown: uncultivated organism sequence
  REGION 1..538: note = Category: MG81 effectors
  REGION 1..538: note = Description: MG81-348 effector
MDNEEKEKDGATCCLTLPLKLEKWQSDHLEKRFEIARQLYNTLVHAELKKKCQVERMPEYQEIMKMIDAASNQKEKWALEKKRKAFLEENGFSRNAFKADMEKYYKHFNDNIGANVALHGITAQVWIAFDKVFVDNYKQKGKVHFKKPGELCSVQGYSQKKSGGKEIMFREDRIIWNQQGNRDRKKVKREFLLKLSPDNPYEAEMLKRHVKFVRILRKDGKTKPHWYAQLVLEGKPAVKRDPISSAPKHPIGHGVVGIDIGTRTLAYSTDSEVNLLELADRVQNIEQEKRRLQRKMDRSRRAMNPGNYKPDGSIKQGVKLTWNNSKRYKRIQHQYAMIQHHQADIRKQQHNELANYLLTLGDCFFVENMSYCDLAHRANKTEISEKTGRYKRKKRFGKSIANKAPAMLITMLKQKCQSRGLEGVKEVDTHVCASQYNHQTDTCIKKALENRWNIMPDGERIQRDLYSAFLLQHCRRDLPEYNRKELQKEFGEELYRVFDREALQRDYPQFVAYHHMTIQRLSELPHTIPSMGIRRIIS

SEQ ID NO: 2071 - protein, 534 aa, unidentified
  REGION 1..534: note = Description of Unknown: uncultivated organism sequence
  REGION 1..534: note = Category: MG81 effectors
  REGION 1..534: note = Description: MG81-349 effector
MGWKSKGRGGTRVKKSSTDTCCLTLPLKLEKWQSDRLEKRFEIGRQIYNTVVRAELKKLHQLERTPQYREIEQKLKEAKQEEAKELWKKRTQLLSQSGFTEYGFKSDMKYYYQHFKENIGSSVAVHGIASQVWTAFEKVLFSKDGKMVHFKKKGELSSLRGYSQAGKSGGIEIIFRGSYVEWKGLKLPLKLSPDNDYETEMLSKRVKYVRILRKEGKTKPHWYAQLVLEGKPAIKRDPASGAPKHPVGHGVVGIDIGTRTLAYSADSKVDLIELADRVQNIEQEKMLLQRKLDRSRRATNPENYKPDGTIKKGVKLTRNKSKRYRKIQHQLAMLQHRQADIRKRQHNELANYLLTLGDCFFVEDMDYRALTRKAKKTEISEKTGRYKRKKRFGKSIANKAPSMLIALLDQKCKSLNLEGVKKVDTAVKASQYNHQTDECKAKELKERWNIMPDGERIQRDLYSAFLLQHCKRGLPEYNRKELQKEFGEELYRVFDREALQRDYPQFVVYHHMTMQRLSALPKTIASMGIRRSIS

SEQ ID NO: 2072 - protein, 538 aa, unidentified
  REGION 1..538: note = Description of Unknown: uncultivated organism sequence
  REGION 1..538: note = Category: MG81 effectors
  REGION 1..538: note = Description: MG81-350 effector
MNNEEKEKEGATCCLTLPLKLEKWQSDHLEKRFEIARQLYNTLVHAELKKKCQVERMPEYQEIMKMIDTASNQKEKWALEKKRKAFLEENGFSRNAFKADMEKYYKHFNDNIGANVALHGITAQVWIAFDKVFVDNYKQKGKVHFKKPGELCSVQGYSQKKSGGKEIMFREDRIIWNQQGNRDRKKVKREFLLKLSPDNPYEAEMLKRHVKFVRILRKDGKTKPHWYAQLVLEGKPAVKRDPISSAPKHPVGHGVVGIDIGTRTLAYSTDKEVNLLELADHVQNIEQEKRRLQRKMDRSRRATNPENYNPDGTFKRGVKLTRNKSKRYRRIQHQLAMIQHHQADIRKQQHNELANYLLTLGDCFFVENMSYCDLVHRANKTEISEKTGRYKRKKRFGKSIANKAPAMLITMLKQKCQSRGLKGVKEVDTHVRASQYNHQTDTCIEKALENRWNVMPDGERIQRDLYSAFLLQHCKQGLPEYNRKELKKEFGEELYRVFDREALQRDYPQFVAYHHMTIQRLSELPHTIPSMGIRRIIS

SEQ ID NO: 2073 - protein, 511 aa, unidentified
  REGION 1..511: note = Description of Unknown: uncultivated organism sequence
  REGION 1..511: note = Category: MG81 effectors
  REGION 1..511: note = Description: MG81-351 effector
MKKSNTDTCCLTLPLKLEKWQEDRLAKRFEIARQIYNTMVHAELKKLRNVENSQPYRQIQKQIEALNWKNQNDKARLKSLYNDRNKLLNTIGFSEYGFKADIKYYYKHFNDNIGSSVAVHGIAPQVWAAFEKMLFHKEGKKVHYKKKDDIHSLHGYSVTGKSGGVEIIFRKTYIEWKGLKLPLKRSPDNAYETEMLDRRVKYVRLLRKPGKRKDCWYAQLSLEGKPAIKRDPESGKRRHSIGRGAVGLDIGPQTLAYSACGAADLVELADQVQNIEQMKRRLQRKLDRSRRATNPDNYADNGTIRRGVKLTHNKSNRYRRTQRELRYLQHCQAEIRKRQHIELANHLLALGDCFYVEDMAWPSLTHRAKETAISEKTGRIKRKKRFGKSVANKAPATLIGILEQKCNSLGLPGVMKVPTSLRASQYNHQSGEYTSKPLSQRWNNMPDGERIQRDLYSAFLLQHYDPKAGNFDSALLQQDYPQFVQYHHRAIQRLSTVPKTLSSMGIQRSLR

SEQ ID NO: 2074 - protein, 334 aa, unidentified
  REGION 1..334: note = Description of Unknown: uncultivated organism sequence
  REGION 1..334: note = Category: MG81 effectors
  REGION 1..334: note = Description: MG81-352 effector
MLSKRVKYVRILRKDGKTKTHWYAQLALEGKPAVKRDSISGAPKHPVGHGVVGIDIGTRTLAYSTDKEVNLLELADRVQNIEQEKRRLQRKMDRSRRAMNPENYNSDGTFKRGVKLTRNKSKRYRRIQHQLAMIQHHQADIRKQQHNELANYLLTLGDCFFVENMSYCDLVHRANKTEISEKTGRYKRKKRFGKSIANKAPAMLITMLKQKCQSRGLKGVKEVDTHVRASQYNHQTDTCIEKALENRWNVMLDGERIQRDLYSAFLLQHCKQGLPEYNRKELKKEFGEELYRVFDREALQRDYPQFVAYHHMTIQRLSELPHTIPSMGIRRIIS

SEQ ID NO: 2075 - protein, 540 aa, unidentified
  REGION 1..540: note = Description of Unknown: uncultivated organism sequence
  REGION 1..540: note = Category: MG81 effectors
  REGION 1..540: note = Description: MG81-353 effector
MATTDKKNEENLRAYKFRLDPNQAQTIALYQAAGAARYTYNMLTAYNLEVNRLRDDYWKKRHDEGISDADIKKELNALTKEDKRYKQLKYGAFGTQYLTPEKKRHEQAEHRIENGEDPSVVWNQETERSANPWLHTANQRVLVSGLQNASDAWDNFWASRTGKRAGRLVGTPRFKKKGVSRDSFTVPAPEKMGAYGTAYLRGEPAYKQGRRKITDYRHVRLSYLGTIRTFNSTKPLVKAVAAGAKIRRYTVSRNADRWYVSFLVKFSEPIRRSATKRARAAGSVGVDLGVKYLASLSDSEAPQRFPNLKFVEGLPSLENPRWSEASSRRLHKLQRALARSQKGSNRRSRLVKQIARLHHMTALRRESNLHQLTKKLATEYTLVGFEDLNVSGMTASAKGTVENPGKNVAQKSGLNRVVLDAAFGVFRNQLEYKAVWYGSAFEKVDRYFASSQTCSECGRKAKTKLTLRDRVFDCAYCGNMMDRDLNAAVNICREAQRLFDEKLASEDRESLNGRGSRGALRGAETVEASRPPASHRRGSP

SEQ ID NO: 2076 - protein, 536 aa, unidentified
  REGION 1..536: note = Description of Unknown: uncultivated organism sequence
  REGION 1..536: note = Category: MG81 effectors
  REGION 1..536: note = Description: MG81-354 effector
MNEKEYKKSLRQFHKHSDRHILVVETDMSFSDIQKVVALSDKIRKAGNELVGLMIKNYDQLIRTKRYRKVRKLYGATEEKKKRKVLASQLNEMQKQYHVTWDDCRTSMIPIGKKYGIDAVFALTKTEDVWRGIEKCLYANGKTLHFSKYGVLPCIRAKQMNRGIPISVKENQLQFKFGESTFGIQRKDRFQSDEIHAVLDYLAEPEIIDKKAIQTFVEKAYCINTYRPCYATLVPKLIRGKYRVYLHLTIEGKAKPKQDRFGNPRHKFGKGIIGADIGTQTVAYTSDTEVGLKNLSERGNSIQKSERLERLYYRAMDRSRRATNPQNYNEDGTIKKGRKSWKYSNHYKRLKAKHAELCRINARNRQLAINEDANSLRSLGDVLITEPKNASKLMKRAKETTKNKKGKFNKKKRFGKSIKSRCPGGFQSTIEKKFEVSGGRYIEVPGNYRASQYDHTADTYVKKKLSDRMYHLADGTLVQRDWYSSFLLYCYDDKIEEINKTKCRTEFEKHYKKEKALIEWIQANQIKILNSGIKTA

SEQ ID NO: 2077 - protein, 554 aa, unidentified
  REGION 1..554: note = Description of Unknown: uncultivated organism sequence
  REGION 1..554: note = Category: MG81 effectors
  REGION 1..554: note = Description: MG81-355 effector
MNNEEKEKDGATCCLTLPLKLEKWQSDHLEKRFEIARQLYNTLVHAELKRIHRIERMPEYREIERLIEATTDKKEKWALKNQKKQFLRKNGINRNTFTTDMKRLYKHFNDNIGSNVAQHGIVSQVLTAFEKVYIENQSGEVHFKKPGDLRSVQGYSQKESGGKEIMFRNGKIIWTQQENDDRKKSPKYQQRKKRQNYKGVKGIAREFPVVFSKNNPYEAEMLTKHVKFVRILRKDGKTKPHWYAQLVLEGKPAIKRDPASGAPKHPIGHGVVGIDIGTRTLAYSTDKEVNLLELADHVQNIEQEKRRLQRKMDRSRRATNPENYNPDGTFKRGVKLTRNKSKRYRRIQHQLAMIQHHQADIRKQQHNELANYLLTLGDCFFVENMSYCDLVHRANKTEISEKTGRYKRKKRFGKSIANKAPAMLITMLKQKCQSRGLKGVKEVDTHVRASQYNHQTDTCIEKALENRWNVMPDGERIQRDLYSAFLLQHCKQGLPEYNRKELKKEFGEELYRVFDREALQRDYPQFVAYHHMTIQRLSELPHTIPSMGIRRIIS

SEQ ID NO: 2078 - protein, 512 aa, unidentified
  REGION 1..512: note = Description of Unknown: uncultivated organism sequence
  REGION 1..512: note = Category: MG81 effectors
  REGION 1..512: note = Description: MG81-356 effector
MGKSSTDTCCLSLPLKLEKWQEDRLAKRFEIARQIYNTLVHAELKRLSQVKRSQQYREIENKIRALDRNDQEDKKELSLLHKLRDDLLRKSGFNDYGFKADIKYFYKHFGENIGANVAVHGIAPQVWSAFDSVLFKKRGKKVHYKKPGDICSLRGYSVTGKSGGSEIMFRGTYIEWKGLKMPLKLSPDNIYESEMLDHRVKYVRIVRKPGKRKDRWYAQLSLECKPVIKCDPVSGEMRHPVGKGPVGLDIGPQTLAYCALSEAGLVELADQVQDIEREKQRLQRRLDRSRRAANPNNYAADGTIKRGVKLTHNKSKRYCILQRELRYLQQQQAETRKRQHTELANYLLSLGDRFYVEDMNWSSLARRAKKTEISEKTGRYKRKKRFGKSIANKAPGSLIDILKQKCESLGIPGVEKLPTSLLKASQYNHQTGEYTPKPRSQRWNDMPDGERIQRDLYSAFLLQHYDPVSKGYDQAALQRDYPQFLQHHHHSIQRLTAKPKTPSSMGIHQRLR

SEQ ID NO: 2079 - protein, 594 aa, unidentified
  REGION 1..594: note = Description of Unknown: uncultivated organism sequence
  REGION 1..594: note = Category: MG81 effectors
  REGION 1..594: note = Description: MG81-357 effector
MVDLKKQLCSSASNSENQGVRFQTVVLYTKFVHKSVQLSPESSVFAVALFVRMMYNTKYQAKRGDPVGEKKNNNNNTDTCVLTLPLRVEKWQEDCLLKRFEAARRIYNSLLNFELKKLRQLERTVEYRQIQSVISSAYRSNTKDSPECKAALKRREKLIDENGLTKNGFKNDVKFFYKHFDGLIGSSVAVHCIAVQLWAAFNKYLCGNGKEIHFKRLGDISSLKGYSVKGKSGGCEIIFRGQYVEWTRKKKKLLLPLKIDPDNEYEREMLSRRVKYVRIIKKPGKNRLRWYAQLTLEGKPALKYSAETGKPIHSVGKGDVGIDIGPQTVAYASDKEVALLELADRVTNIEHQKKKLQRKLDRSRRATNPDNYKPDGTIKRGVKLTRNKSKRYLKLQSKLAYIQHRQAEIRKLQHTCLANHMLTLGDRFFVEKMNWPGLAHRAKETSISEKTGRYKRKKRFGKSLANKAPAMFISILKQKCETLGLPGVVEVDTFRLKASQYNHLSDTCEKKSLSERWNYMPISDGSDSSKTKRIQRDLYSAFLLQHTIPQSCSFDKEALRIDYPNFVTMHDAEIHRLESLPKTITSMGVRRSHS

SEQ ID NO: 2080 - protein, 511 aa, unidentified
  REGION 1..511: note = Description of Unknown: uncultivated organism sequence
  REGION 1..511: note = Category: MG81 effectors
  REGION 1..511: note = Description: MG81-358 effector
MKKSNTDTCCLTLPLKLEKWQEDRLAKRFEIARQIYNTMVHAELKKLRNIENSQPYRQIQKQIEALNWKNQNDKAQLKSLYNDRNKLLNTIGFSEYGFKADIKYYYKHFNDNIGSSVAVHGIAPQVWAAFEKMLFHKEGKKVHYKKKDDIHSLHGYSVTGKSGGVEIIFRKTYIEWKGLKLPLKRSPDNAYETEMLGRRVKYVRLLRKPGKRKDCWYAQLSLEGKPAIKRDPESGKRRHSIGRGAVGLDIGPQTLAYSACGAADLVELADQVQNIEQMKRRLQRKLDRSRRATNPDNYADNGTIRRGVKLTHNKSNRYRRTQRELRYLQHCQAEIRKRQHIELANHLLALGDCFYVEDMAWPSLTHRAKETAISEKTGRIKRKKRFGKSVANKAPATLIGILEQKCNSLGLPGVMKVPTSLRASQYNHQSGEYTSKPLSQRWNNMPDGERIQRDLYSAFLLQHYDPKAGNFDSALLQQDYPQFVQYHHRAIQRLSTVPKTLSSMGIQRSLR

SEQ ID NO: 2081 - protein, 512 aa, unidentified
  REGION 1..512: note = Description of Unknown: uncultivated organism sequence
  REGION 1..512: note = Category: MG81 effectors
  REGION 1..512: note = Description: MG81-359 effector
MPTKQKEGGNRCVLTLPLLTEPWQEHIIEKRFKIIEHLKNQLISIELRKLKNLQRTKAYKNLIKQIESVPKSERTALYKERNKMLKDAGFSQYTFMDDMAGKKSLMQKHFESHINVQIAHKAAIDVWSSFEKFLFGTGQIVHYQKRGTLSSVASKSPKTGMFYYPDENIFKWSGGGTKPKGGIILCLRVASVKTNYEKEMVANNEIKYYRVVRKWMKTKYKYYLQITFAGKPADKHREISTGRVGIDIGTQTIAIASDKSVKLLELADKVNKNHIKKCELQRKLDRSRRYTNPDNFNPDGTVKRGTKGHKLKWNKSKHYIEIAGKIRELERKNADIRKYQHTCLANDILAMGNQIYIEPMNYKGLQKRAKETQVDEKGRYKKKKRFGKSLANKAPAMFVTILKTKAEQHGGEVYEVDIMSYRASQCDHTTGEYTKHGLNDRWRILGNGDKVQRDLYSAFLIKNSNKTHDEIDLDKCSKTYDNFKKLHDKEIENIRNEVKLRERKNISSYGIA

SEQ ID NO: 2082 - protein, 538 aa, unidentified
  REGION 1..538: note = Description of Unknown: uncultivated organism sequence
  REGION 1..538: note = Category: MG81 effectors
  REGION 1..538: note = Description: MG81-360 effector
MNNEEKEKEGATCCLTLPLKLEKWQSDHLEKRFEIARQLYNTLVHAELKKKCQVERMPEYQEIMKMIDTASNQKEKWALEKKRKAFLEENGFSRNAFKADMEKYYKHFNDNIGANVALHGITAQVWIAFDKVFVDNYKQKGKVHFKKPGELCSVQGYSQKKSGGKEIMFREDRIIWNQQGNRDRKKVKREFLLKLSPDNPYEAEMLKRHVKFVRILRKDGKTKPHWYAQLVLEGKPAVKRDPASGAPKHPIGHGVVGIDIGTRTLAYSTDKEVNLLELADHVQNIEQEKRRLQRKMDRSRRATNPENYNPDGTFKRGVKLTRNKSKRYRRIQHQLAMIQHHQADIRKQQHNELANYLLTLGDCFFVENMSYCDLVHRANKTEISEKTGRYKRKKRFGKSIANKAPAMLITMLKQKCQSRGLKGVKEVDTHVRASQYNHQTDTCIEKALENRWNVMPDGERIQRDLYSAFLLQHCRRDLPEYNRKELQKEFGEELYRVFDREALQRDYPQFVAYHHMTIQRLSELPHTIPSMGIRRIIS

SEQ ID NO: 2083 - protein, 397 aa, unidentified
  REGION 1..397: note = Description of Unknown: uncultivated organism sequence
  REGION 1..397: note = Category: MG81 effectors
  REGION 1..397: note = Description: MG81-361 effector
MAKCSTDTCCLTLPLRLEKWQEDRLAKRFEIARQIYNTMVRAELKKLRAMEQSEPYKANQEKIQALDWKTQADKQALKALYKERDKLLRDGGFSEYGFKSDIKNYYKHFNNNIGSSVAVHGIAPQVWAAFEKMLFKKEGKKVHFKKKGDIHSLRGYSAAGKSGGVEIIFRETYIEWKGLKLPLKLSPDNIYETQMLSYRVKYVRLLRKPGKRKDRWYAQLSLEGKPVIKYNPKTGEVRHPIGKGAVGLDIGPQTLAYSAATGADLVELANQVQNVEQEKRRLQRKLDRSRRATNPGNYADDGTIRRGIALTHNKSKRYLRTQQELKYLQHQQAEIRKRQHTELANHLLSLGDCFYVEKMVWTSLTHRAKETEISEKPEKSKGKRGSGNPSLTKLQPR

SEQ ID NO: 2084 - protein, 335 aa, unidentified
  REGION 1..335: note = Description of Unknown: uncultivated organism sequence
  REGION 1..335: note = Category: MG81 effectors
  REGION 1..335: note = Description: MG81-362 effector
MAKCSTDTCCLTLPLRLEKWQEDRLAKRFEIARQIYNTMVRAELKKLRAMEQSEPYKANQEKIQALDWKTQTDKQALKALYKERDKLLRDGGFSEYGFKSDIKNYYKHFNNNIGSNVAFHGIAPQVWAAFEKMLFKKEGKKVHFKKKGDIHSLRGYSAAGKSGGVEIIFRETYIEWKGLKLPLKLSPDNIYETQMLSYRVKYVRLLRKPGKRKDRWYAQLSLEGKPVIKYNPKTGEVRHPIGKGAVGLDIGPQTLAYSAATGADLVELANQVQNVEQEKRRLQRKLDRSRRATNPGNYADDGTIRRGIALTHNKSKRYLRTQQELKYLQHQQAEI

SEQ ID NO: 2085 - protein, 512 aa, unidentified
  REGION 1..512: note = Description of Unknown: uncultivated organism sequence
  REGION 1..512: note = Category: MG81 effectors
  REGION 1..512: note = Description: MG81-363 effector
MPAKQKEGGNRCVLTLPLLTEPWQEHIIEKRFKIIEHLKNQLISIELRKLKNLQRTKAYKNLIKQIESVPKSERTALYKERNKMLKDAGFSQYTFMDDMAGKKSLMQKHFESHINVQIAHKAAIDVWSSFEKFLFGTGQIVHYQKRGTLSSVASKSPKTGMFYYSDENIFKWSGGGTKPKGGIILCLRVAPVKTNYEKEMVANNETKYYRVVRKWMKTKYKYYLQITFAGKPADKHREISTGRVGIDIGTQTIAIASDKSVKLLELADKVNKNHIKKCELQRKLDRSRRYTNPDNFNPDGTVKRGTKGHKLKWNKSKHYIEIAGKIRELERKNADIRKYQHTCLANDILAMGNQIYIEPMNYKGLQKRAKETQVDEKGRYKKKKRFGKSLANKAPAMFVTILKTKVEQHGGEVYEVDIMSYRASQCDHTTGEYTKHGLNDRWRILGNGDKVQRDLYSAFLIKNSNKTHDEIDLDKCSKTYDNFKKLHDKEIENIRNEVKLRERKNISSYGIA

SEQ ID NO: 2086 - protein, 512 aa, unidentified
  REGION 1..512: note = Description of Unknown: uncultivated organism sequence
  REGION 1..512: note = Category: MG81 effectors
  REGION 1..512: note = Description: MG81-364 effector
MPTKQKEGGNRCVLTLPLLTEPWQEHIIEKRFKIIEHLKNQLISIELRKLKNLQRTKAYKNLMKRIESVPKSERTALYKERNKMLKDAGFSQYTFMDDMAGKKSLMQKHFESHINVQIAHKAAIDVWSSFEKFLFGSGQMIHYQKRGTLSSVASKSPKTGMFYYSDENIFKWSGGGTKPKGGIILCLRVASVKTNYEKEMVANNEIKYYRVVRKWMKTKYKYYLQITFAGKPADKHREISTGRVGIDIGTQTIAIASDKSVKLLELADKVNKNHIKKCELQRKLDRSRRYTNPDNFNPDGTVKRGTKGHKLKWNKSKHYLEIAGKIRELERKNADIRKYQHTCLANDILAMGNQIYIEPMNYKGLQKRAKETQVDEKGRYKKKKRFGKSLANKAPAMFVTILKTKAEQHGGEVYEVDIMSYRASQCDHTTGEYTKHGLNDRWRILGNGDKVQRDLYSAFLIKNSNKTHDEIDLDKCSKTYDNFKKLHDKEIENIRNEVILRERRNISSYGIA

SEQ ID NO: 2087 - protein, 511 aa, unidentified
  REGION 1..511: note = Description of Unknown: uncultivated organism sequence
  REGION 1..511: note = Category: MG81 effectors
  REGION 1..511: note = Description: MG81-365 effector
MGKSSTDTCCLTLPLKLEKWQEDRLAKRFEIARQIYNTMVRAELKRLRQVEQSPQYRSNKKAIQALDWKNTADKPKLKTLYRERDKLLKGGGFTEYGFKSDIKNFYKHFVENIGSSVAVHGIAPQVWAAFERVLFKKEGKKVHFKKTGDIRSLRGYSVTGKSGGVEIIFRGSYIEWKGLNLPLKLSPDNAYETEMLSYRVKYVRILRKPGKTRDRWYAQLSLEGKPAIKRNPASGNPVHPVGQGAVGLDIGPQTLAYAAEKEANLVELADRVQNIEREKHLLQRKMDRSRRAANPDNYAENGTIRRGVKLTHNKSKRYLRLQRELCYLQHCQAETRKRQHTELANHLLSLGSCFYVEDMAWPSLTHRAKKTEISDKTGRIKRKKRFGKSIANKAPAALINILRTKCVSLGIPGVVEVPTSLKASQYNHQSKEYTPKPLSQRWNDMPDGSRIQRDLYSAFLLQHYDPQSGNFDQASLEADYPQFVQLHNQSIQRLLTVPKTPSSMGIRRSVS

SEQ ID NO: 2088 - protein, 512 aa, unidentified
  REGION 1..512: note = Description of Unknown: uncultivated organism sequence
  REGION 1..512: note = Category: MG81 effectors
  REGION 1..512: note = Description: MG81-366 effector
MKKSSTDTCCLTLPLKLEKWQEDRLAKRFEIARQLYNTLVHAELKRLAQVKQTAEYRENERKIRTLDWNDPGDQAKLKGLYKERRKSLKTAGFTDYSFTTDMGKYYKHFRDNIGSSVAVHGIAPQVWAAFDKVLFKKGGKKVHYKKPGEVNSVQGYSRTGKSGGTEIMFRGPYIEWKGLKLPLKVSPDNAYETDMLQRRVKLVRLVRRPGKRRDRWYAQLVLEGKPAIKADPVTGKAVRPIGSGPVGLDIGPQTLAYSAAGVAGLVELADRVQNIEQEKRCLQRKMDRSRRATNPDNYAEDGTIRRGVKLTHNKSKRYRRSQQELKYLQHRQAEMRKLQHIQLANHLLSLGDHFYVEKMEWSSLTHRAKKTVISEKTGKPRSKKRFGKSIANKAPAMLIEILRQKCKSLGLPNVVEINPADIKASQYNHLTGEYVKKSLSRRWNEMQDGEHLQRDLYSAFLLQHYDSMSKALDLDSLARDYPAFVQYHHREIERLHALPKTPSSMGIRRSIA

SEQ ID NO: 2089 - protein, 511 aa, unidentified
  REGION 1..511: note = Description of Unknown: uncultivated organism sequence
  REGION 1..511: note = Category: MG81 effectors
  REGION 1..511: note = Description: MG81-367 effector
MAKCSTDTCCLTLPLRLEKWQEDRLAKRFEIARQIYNTMVRAELKKLRAIEQSEPYKANQEKIQALDWKTQADKQALKALYKERDKLLRDGGFSEYGFKSDIKNYYKHFNNNIGSSVAVHGIAPQVWAAFEKMLFKKEGKKAHFKKKGDIRSLRGYSVAGKSGGVEMIFRETYIEWKGLKLPLKLSPDNIYETQMLSYRVKYVRLLRKPGKRKDRWYAQLSLEGKPVIKYNPKTGEVRHPIGKGAVGLDIGPQTLAYSAATGADLVELANQVQNVEQEKRRLQRKLDRSRRATNPGNYADDGTIRRGIALTHNKSKRYLRTQQELKYLQHQQAEIRKRQHTELANHLLSLGDCFYVEKMAWTSLTHRAKETEISEKTGKIKRKKRFGKSVANKAPATLIGILQRKSAALGIPGVIEVPTSVKASQYNHQSGTYTPKPLSQRWNNMPDGERIQRDLYSAFLLQHYDPQTNTFDANSLHQDYPQFVQYHHDAVLRLYAMPKTPSSMGIKRSLR

SEQ ID NO: 2090 - protein, 338 aa, unidentified
  REGION 1..338: note = Description of Unknown: uncultivated organism sequence
  REGION 1..338: note = Category: MG81 effectors
  REGION 1..338: note = Description: MG81-368 effector
MDYLAQPEIIDDKAVKILQDEACCISTYRPCYATLVPKFIRGKYRVYLHLVIEGKAKPKYDSSGKPRHKYGKGVVGADIGTQTVAYTSDTETGLKNLSERGNSIQKSERLERLYYRAMDRSRRATNPKNYNADGTIKKGKKKWTYSRHYKKLKAKHAELCRINAINRQLAINEDANHLRSLGDIFVTEPKNAARLMKRAKETTVNNKGRINRKKRFGKSVKNRCPGGFQTAVENKFKTSGGTYIEVPNNYRASQYDHTADDYIKKKLSDRMYKLTDGTLVQRDWYSSFLLYCYNYRTNDIDKKKCAAEFKKCYSMEKEFIEWIKANKIKVLNSGIKTA

SEQ ID NO: 2091 - protein, 528 aa, unidentified
  REGION 1..528: note = Description of Unknown: uncultivated organism sequence
  REGION 1..528: note = Category: MG81 effectors
  REGION 1..528: note = Description: MG81-369 effector
MILLTKNNNNTDTCVLTLPLRVEKWQEDCLLKRFEAARRIYNSLLNFELKKLRQLERTVEYRQIQSVISSAYRSNTKDSPECKDAFKRREKLISANGISENGFKSDVKFFYKHFDGLIGSNVAVHCIAVQLWAAFDKYLSGSGKEIHFKRLGDISSLKGYSVKGKSGGREIIFRGQYIEWTRKKKKLLLPLKIDPDNEYEREMLSRRVKYVRIIKKPGKNRLRWYAQLTLEGKPALKYSAETGKPIHSVGKGNVGIDIGPQTIAYASDKEVALLELADRVTNIEHQKKKLQRKLDRSRRATNPDNYKPDGTIKRGVKLTRNKSKRYLKLQSKLAYIQHRQAEIRKLQHTCLANHMLTLGDRFFVEKMNWPGLAHRAKETSISEKTGRYKRKKRFGKSLANKAPAMFISILKRKCETLGLPGVVEVDTFRLRASQYNHLSDTYEKKSLSERWNYMPISDGSDSSKTKRIQRDLYSAFLLQHTIPQPCSFDKEALRIDYPNFVIMHDAEIHRLESLPKTVTSMGVRRSHS

SEQ ID NO: 2092 - protein, 530 aa, unidentified
  REGION 1..530: note = Description of Unknown: uncultivated organism sequence
  REGION 1..530: note = Category: MG81 effectors
  REGION 1..530: note = Description: MG81-370 effector
MILLAKNNNNNNTDTCVLTLPLRVEKWQEDCLLKRFEAARRIYNSLLNFELKKLRQLERTVEYRQIQSVISSAYRSNTKDSPECKDAFKRREKLISANGISENGFKSDVKFFYKHFDGLIGSNVAVHCIAVQLWAAFDKYLSGSGKEIHFKRLGDISSLKGYSVKGKSGGREIIFRGQYVEWTRKKKKLLLPLKIDPDNEYEREMLSRRVKYVRIIKKPGKNRLRWYAQLTLEGKPALKYSAETGKPIHSVGKGNVGIDIGPQTVAYASDKEVALLELADRVTNIEHQKKKLQRKLDRSRRATNPDNYKPDGTIKRGVKLTRNKSKRYLKLQSKLAYIQHRQAEIRKLQHTCLANHMLTLGDRFFVEKMNWPGLAHRAKETSISEKTGRYKRKKRFGKSLANKAPAMFISILKRKCETLGLPGVVEVDTYNLKASQYNHLSDTYEKKSLSERWNYMPISDGSDSSKTKRIQRDLYSAFLLQHTIPQPCSFDKEALREDYPNFVTMHDAEIHRLESLPKTVTSMGVRRSHS

SEQ ID NO: 2093 - protein, 519 aa, unidentified
  REGION 1..519: note = Description of Unknown: uncultivated organism sequence
  REGION 1..519: note = Category: MG81 effectors
  REGION 1..519: note = Description: MG81-371 effector
MIQPELKAYRRCSDRHVLVLETNLTYVEKCQIFHYADLVRKAGNELTGIMKKRYDQLVRTKRYRKLKSLYKRYKDADNKKALKDVCDQMKEMQKQYDVTWDYCRTSMIPIGKKYGIDAVFALTKAEDVFRGIEKCLYSDGETVHFKKRGDLPCIRAKQINRGIIMKQMNFKFKNIEFGVKIKDRYEQEEVNAILYYLKHAEFMDSIAANTYKETNICISTYRPCYVSIVCKKIRGKLRVYVHITIEGLSKPKQDRFGNVKHNKGKGIVGCDIGTQTIAYTTETKAGLKNLAERGSCIEVNERKERRIYRAMDRSRRAMNPDNYNEDGTIKKGKKKWVLSNRYKKLRTKHTELCRINATNRHLAINADVNELRSLGDIFVTETKNAKKLQKKAKTGKRKKRFGRSIKNRCPGYFQSQAKRKFRIYVEVPNDYKASQYDHTSDEYVKKSLSQRMYKLQDGTMVQRDLYSSFLLYCIDLSTNKIDKNKCIHEFEKQYKNQNETIEYIQMNQIKVMNSGIRVN

SEQ ID NO: 2094 - protein, 680 aa, unidentified
  REGION 1..680: note = Description of Unknown: uncultivated organism sequence
  REGION 1..680: note = Category: MG81 effectors
  REGION 1..680: note = Description: MG81-372 effector
MKKSSTDTCCLTLPLKLEKWQSDRLEKRFEIGRQIYNTVVRAELKKLQQVERTPQYREIEQKLKGAKQEEAKELWKKRTQLLSKSGFSEYGFKSDMKYYYQHFKENIGSSVAVHGIASQVWTAFEKVLFSKDGKMVHFKKKGELSSLRGYSQAGKSGGIEIIFRGSYVEWKGLKLPLKLSPDNDYETEMLSKRVKYVRILRKEGKTKPHWYAQLVLEGKPAIKRDPASGAPKHPVGHGVVGIDIGTRTLAYSADSKVDLIELADRVQNIEQEKLLLQRKLDRSRRATNPGNYNPDGTIKKGVKLTRNKSKRYRKIQHQLAMLQHRQADIRKRQHNELANYLLTLGDCFFVEDMDYRALTRKAKKTEISEKTGRYKRKKRFGKSIANKAPSMLIALLDQKCESLNLEGVKKVDTAVKASQYNHQTDECKAKELKERWNIMPDGERIQRDLYSAFLLQHCKRGLPEYNRKKLQEAFGNELYRSLIVKHSKGTIRNLWNTIGRRFNAFPCCPKRLPAWASGESSANMKIRCGSHQQNRSIVRPGLSLMATKVALTAEEFRENSQRSIDLFNTEKLSTNSTHVRKKCILQFCAFLPLQSARSVWRQSLYPGDVEKVPQVAICTERVEAKEPASHGGRKRKSCNLHGACGGKARQGDPQRGQGGVAICTERVKAKYSHYAYSPLT

SEQ ID NO: 2095 - protein, 524 aa, unidentified
  REGION 1..524: note = Description of Unknown: uncultivated organism sequence
  REGION 1..524: note = Category: MG81 effectors
  REGION 1..524: note = Description: MG81-373 effector
MAKNNNTDTCVLTLPLRVEKWQEDCLLKRFEAARRIYNSLLNFELKKLRQLERTVEYRQIQSVISSAYRSNTKDSPECKDAFKRREKLISANGISEYGFKSDVKFFYKHFDGLIGSNVAVHCIAVQLWAAFDKYLRGSGKEIHFKRLGDISSLKGYSVKGKSGGREIIFRGQYIEWTRKKKKLLLPLKIDPDNEYEREMLSRRVKYVRIIKKPGKNRLRWYAQLTLEGKPALKYSAGTGKPIHSVGKGNVGIDIGPQTVAYASDKEVALLELADRVTNIEHQKKKLQRKLDRSRRATNPDNYKPDGTIKRGVKLTRNKSKRYLKLQSKLAYIQHRQAEIRKLQHTCLANHMLTLGDRFFVEKMNWPGLAHRAKETSISEKTGRYKRKKRFGKSLANKAPAMFISILKRKCETLGLPGVVEVDTYSLKASQYNHLSDTYEKKSLSERWNYMPISDGSDSSKTKRIQRDLYSAFLLQHTIPQPCSFDKKALRIDYPNFVTMHDAEIHRLESLPKTITSMGVRRSHS

SEQ ID NO: 2096 - protein, 534 aa, unidentified
  REGION 1..534: note = Description of Unknown: uncultivated organism sequence
  REGION 1..534: note = Category: MG81 effectors
  REGION 1..534: note = Description: MG81-374 effector
MGWKSKGRGGTLVKKSSTDTCCLTLPLKLEKWQSDRLEKRFEIGRQIYNTVVRAELKKLQQVERTPQYREIEQKLKEAKQEEAKELWKTRTQLLSKSGFSEYGFKSDMKYYYQHFKENIGSSVAVHGIASQVWTAFEKVLFSKDGKMVHFKKKGELSSLRGYSQAGKSGGIEIIFRGSYVEWKGLKLPLKLSPDNDYETEMLSKRVKYVRILRKEGKTKPHWYAQLVLEGKPAIKRDPASGAPKHPVGHGVVGIDIGTRTLAYSADSKVDLIELADRVQNIEQEKMLLQRKLDRSRRATNPENYKPDGTIKKGVKLTRNKSKRYRKIQHQLAMLQHRQADIRKRQHNELANYLLTLGDCFFVEDMDYRALTRKAKKTEISEKTGRYKRKKRFGKSIANKAPSMLIALLDQKCKSLNLEGVKKVDTAVKASQYNHQTDECKAKELKERWNIMPDGERIQRDLYSAFLLQHCRRDLPEYNRKKLQETFGNELYRVFDREALQRDYPKFVEYHRETIQRLSALPKTIASMGIRRSIS

SEQ ID NO: 2097 - protein, 537 aa, unidentified
  REGION 1..537: note = Description of Unknown: uncultivated organism sequence
  REGION 1..537: note = Category: MG81 effectors
  REGION 1..537: note = Description: MG81-375 effector
MIIDGGYKKLLKQFHKHSDRHILVIETDMPYSDILKVVALSDKIRKAGNELVGLMKKNYAQLLRTKRYRKLLFLYGNTEDKDKRKIYANQLNEMQKIYNVTWNYCRTSMIPIGKKYGIDAVFALTKAEDVWRGMEKCLYGNGNTVHFSKHGDLPCIRAKQISRGIPISVRNDKLQFKLGKTSFGIQVNDRFQQDEVNAVLSYLVEPEIMDNKAVNTLIEDAYCIDTYRPCYATLVPKMIRGKYRVYLHLTIEGKTKLKYDKHGNPRYKYGKGIIGADIGTQTVAYTSDTEVGLKNLSERGNSIQTSERKERLLYRAMDRSRRATNPQNFNEDGTVKKGRKTWKYSNHYKKLKTKHSELCRINAVNRQLAINEDANHLRGLGDTLVTEPKNASKLMKRAKETTVNSKGKFNKKKRFGKSIKNRCPSGFQTTVEKKFKTTGGTYIEVPNNYRASQYDHTVDDYIKKKLSDRLYKLQDGTEVQRDWYSSFLLYCYDYKIQNIDKNKCITEFDNCYKKEKALITWIKTHKIKVLNSGIKTA

SEQ ID NO: 2098 - protein, 511 aa, unidentified
  REGION 1..511: note = Description of Unknown: uncultivated organism sequence
  REGION 1..511: note = Category: MG81 effectors
  REGION 1..511: note = Description: MG81-376 effector
MGKSSTDTCCLTLPLKLEKWQEDRLAKRFEIARQIYNTMVRAELKKLDRVKQLPEYRKNQKEIQALDWKNSADKQRLKELYGNQRKILQKQGFTEYGFKSDSKDYYKHFIENIGSSVATHCIAPQVWNAFDKMLFQKDGKVVHFKRYGDVHSLKGGSVAHKSGGTEIMFRKTYIEWKGLKLPLKLSPNNAYEAEMLSYRVKYVRILRTRGKTKDRWYAQLSLEGKPAVKYDSNTGKPVHPVGRGAVGLDIGPQTLAYAAANEANLVELADQVQNIEQEKRRLQRKLDRSRRATNPDNYNENGTIRQGVKLTHNKSKRYCKLQKELSWIQHCQAETRKRQHIALANHLLSLGDCFYVEPMAWPSLTHRAKKTEVSEKTGRIKRKKRFGKSVANKAPASLIGILKLKCISLGLTGVVEVPMLLKASQYNHQSKDYAKKSLSQRWNDMPDGNRIQRDLYSAFLLQHYNSQSESFDQETLERDYPQFVRLHNQTIQRLSALPKTPSSMGIRRSVS

SEQ ID NO: 2099 - protein, 353 aa, unidentified
  REGION 1..353: note = Description of Unknown: uncultivated organism sequence
  REGION 1..353: note = Category: MG81 effectors
  REGION 1..353: note = Description: MG81-377 effector
MSGKSGGTEIIFHKTYIAWKGLTLPLKLSPDNAYEKEMLMRRIKYVRILRKPGKHKDRWYAQLSLEGNPVVKLDPVSGLPRHPIGKGAVGIDIGPQTLAYSAEGGADLVELADQVQCIEQEKSRLQRKMDRSRRASNPDNYAQDGTIKRGVKLTHNKSRRYCKLQKELAYMLYRQAETRKRQHRELINRLLTMGDCFYIEDMHWNSLAHRAKKTEISEKTGRYKRKKRFGKSIANKAPAMLVDMLKQKCKSLELDVVMVNTSLKASQYNHQTGKYEKKTLSQRWNHMPDGEQIQRDLYSAFLLQHVVPEKNAFDNEALCREYPKFVQYHHEVIERLRSLPKTISSMGIRRSVS

SEQ ID NO: 2100 - protein, 512 aa, unidentified
  REGION 1..512: note = Description of Unknown: uncultivated organism sequence
  REGION 1..512: note = Category: MG81 effectors
  REGION 1..512: note = Description: MG81-378 effector
MPTKQKEDSNRCVLTLPLLTEPWQEHIIEKRFKIIEHLKNQLISIELRKLKKLQRTKAYKNLIKQIESVPKSERTVLYKKRNKMLKDAGFSQYTFMDDMAGKKSLMQKHFESHINVQIAHKAAIDVWSSFEKFLFGSGQMIHYQKRGTLSSVASKSPKTGMFYYSDENIFKWSGGGTKPKGGIILCLRVASVKTNYEKEMVANNEIKYYRVVRKWMKTKYKYYLQITFAGKPADKHHEVSTDRVGIDIGTQTIAIASDKSVKLLELADKVNKNHIKKCELQRKLDRSRRYTNPDRFNPDGTVKRGTKGHKLKWNKSKHYIEIAGKIRELERKNADIRKYQHTCLANDILAMGNQIYIEPMNYKGLQKRAKETQVDEKGRYKKKKRFGKSLANKAPAMFVTILKTKAEQHGGEVYEVDIMSYRASQCDHTTGEYTKHGLNDRWRILGNGDKVQRDLYSAFLIKNSNKTHDEIDLDKCSKTYDNFKKLHDKEIENIRNEVILRKRRNISSYGIA

SEQ ID NO: 2101 - protein, 538 aa, unidentified
  REGION 1..538: note = Description of Unknown: uncultivated organism sequence
  REGION 1..538: note = Category: MG81 effectors
  REGION 1..538: note = Description: MG81-379 effector
MDNEEKEKDGATCCLTLPLKLEKWQSDHLEKRFEIARQLYNTLVHAELKKKCQVERMPEYQEIMKMIDAASNQKEKWALEKKRKAFLEENGFNRNAFKADMEKYYKHFNDNIGANVALHGITAQVWIAFDKVFVDNYKQKGKVHFKKPGELCSVQGYSQKKSGGKEIMFREDRIIWNQQGNRDRKKVKREFLLKLSPDNPYEAEMLKRHVKFVRILRKDGKTKTHWYAQLALEGKPAVKRDSISGAPKHPVGHGVVGIDIGTRTLAYSTDKEVNLLELADRVQNIEQEKRRLQRKMDRSRRAMNPGNYKPDGSIKQGVKLTWNNSKRYKRIQHQYAMIQHHQADIRKQQHNELANYLLTLGDCFFVENMSYCDLAHRANKTEISEKTGRYKRKKRFGKSIANKAPAMLITMLKQKCQSRGLEGVKEVDTHVCASQYNHQTDTCIKKALENRWNIMPDGERIQRDLYSAFLLQHCRRDLPEYNRKELQKEFGEELYRVFDREALQRDYPQFVAYHHMTIQRLSELPHTIPSMGIRRIIS

SEQ ID NO: 2102 - protein, 388 aa, unidentified
  REGION 1..388: note = Description of Unknown: uncultivated organism sequence
  REGION 1..388: note = Category: MG81 effectors
  REGION 1..388: note = Description: MG81-380 effector
MVHFKKKGELSSLRGYSQAGKSGGIEIIFRGSYVEWKGLKLPLQLSPNNEYETEMLSKRVKYVRILRKDGKTKTHWYAQLALEGKPAVKRDSISGAPKHPVGHGVVGIDIGTRTLAYSTDSEVNLLELADRVQNIEQEKRRLQRKMDRSRRAMNPGNYKPDGSIKQGVKLTWNNSKRYKRIQHQYAMIQHHQADIRKQQHNELANYLLTLGDCFFVENMSYCDLAHRANKTEISEKTGRYKRKKRFGKSIANKAPAMLITMLKQKCQSRGLEGVKEVDTHVCASQYNHQTDTCIKKALENRWNIMPDGERIQRDLYSAFLLQHCRRDLPEYNRKELQKEFGEELYRVFDREALQRDYPQFVAYHHMTIQRLSELPHTIPSMGIRRIIS

SEQ ID NO: 2103 - protein, 530 aa, unidentified
  REGION 1..530: note = Description of Unknown: uncultivated organism sequence
  REGION 1..530: note = Category: MG81 effectors
  REGION 1..530: note = Description: MG81-381 effector
MILLAKNNNNNNTDTCVLTLPLRVEKWQEDCLLKRFEAARRIYNSLLNFELKKLRQLERTVEYRQIQSVISSAYRSNTKDSPECKDAFKRREKLISANGISEYGFKSDVKFFYKHFDGLIGSSVAVHCIAVQLWAAFDKYLRGSGKEIHFKRLGEISSLKGYSVKGKSGGLEIIFRGQYVEWTRKKKKLLLPLKIDPDNEYEREMLSRRVKYVRIIKKPGKNRLRWYAQLTLEGKPALKYSAETGKPIHSVGKGDVGIDIGPQTVAYASDKEVALLELADRVTNIEHQKKKLQRKLDRSRRATNPDNYKPDGTIKRGVKLTRNKSKRYLKLQSKLAYIQHRQAEIRKLQHTCLANHMLTLGDRFFVEKMNWPGLAHRAKETSISEKTGRYKRKKRFGKSLANKAPAMFISILKRKCETLGLPGVVEVDTFRLKASQYNHLSDTYEKKSLSERWNYMPISDGSDSSKTKRIQRDLYSAFLLQHTIPQPCSFDKEALREDYPNFVTMHDAEIHRLEYLPKTITSMGVRRSHS

SEQ ID NO: 2104 - protein, 561 aa, unidentified
  REGION 1..561: note = Description of Unknown: uncultivated organism sequence
  REGION 1..561: note = Category: MG81 effectors
  REGION 1..561: note = Description: MG81-382 effector
MSNLLFLLENEEKEKDGATCCLTLPLKLEKWQSDHLEKRFEIARQLYNTLVHAELKRIHRIERMPEYREIERQIEATTDKKEKWALKNQKKQFLRKNGINRNTFTTDMKRLYKHFNDNIGSNVAQHGIVSQVLTAFEKVYIENQSGEVHFKKPGDLRSVQGYSQKESGGKEIMFRNGKIIWTQQENDDRKKSPKYQQRKKRQNYKGVKGIAREFPVVFSKNNPYEAEMLTKHVKFVRILRKDGKTKPHWYAQLVLEGTPVAKYDPISGAPKHPVGHGVVGIDIGTRTLAYSTDSEVNLLELADRVQNIEQEKRRLQRKMDRSRRAMNPENYNSDGTFKRGVKLTRNKSKRYRRIQHQLAMIQHHQADIRKQQHNELANYLLTLGDCFFVENMSYCDLVHRANKTEISEKTGRYKRKKRFGKSIANKAPAMLITMLKQKCQSRGLKGVKEVDTHVRASQYNHQTDTCIEKALENRWNVMPDGERIQRDLYSAFLLQHCKQGLPEYNRKELKKEFGEELYRVFDREALQRDYPQFVAYHHMTIQRLSELPHTIPSMGIRRIIS

SEQ ID NO: 2105 - protein, 522 aa, unidentified
  REGION 1..522: note = Description of Unknown: uncultivated organism sequence
  REGION 1..522: note = Category: MG81 effectors
  REGION 1..522: note = Description: MG81-383 effector
MKKSSTDTCCLTLPLKLEKWQSDRLEKRFEIGRQIYNTVVRAELKKLQQVERTPQYREIEQKLKGAKQEEAKELWKKRTQLLSKSGFSEYGFKSDMKYYYQHFKENIGSSVAVHGIASQVWTAFEKVLFSKDGKMVHFKKKGELSSLRGYSQAGKSGGVEIIFRGSYVEWKGLKLPLKLSPDNDYETEMLSKRVKYVRILRNEGKTKPHWYAQLVLEGKPAIKRDPASGAPKHPVGHGAVGIDIGTRTLAYSTDKEVNLLELADRVQNIEQEKRRLQRKMDRSRRATNPENYNPDGTFKRGVKLTRNKSKRYRRIQHQLAMIQHHQADIRKQQHNELANYLLTLGDCFFVENMSYCDLVHRANKTEISEKTGRYKRKKRFGKSIANKAPAMLITMLKQKCQSRGLEGVKEVDTHVRASQYNHQTDTCIEKALENRWNVMPDGERIQRDLYSAFLLQHCKQGLPEYNRKELKKEFGEELYRVFDREALQRDYPQFVAYHHMTIQRLSELPHTIPSMGIRRIIS

SEQ ID NO: 2106 - protein, 512 aa, unidentified
  REGION 1..512: note = Description of Unknown: uncultivated organism sequence
  REGION 1..512: note = Category: MG81 effectors
  REGION 1..512: note = Description: MG81-384 effector
MKKRSTDTCCLTLPLKLEKWQEDRLAKRFEIARQLYNTLVHAELKRLVQIKRTAEYLENEQKIRALDRNNPADRAKLQELYKEQRKSLKTAGFTDYSFTTDMGKYYKHFRDNIGSSVAVHGIAPQVWAAFDKLLFKKGGKKVHYKKPGEVNSVQGYSRTGKSGGTEIMFRGPYIERKGLKLPLKLSPDNAYETDMLQRRVKLVRLVRRPGKRRDRWYAQLVLEAKPAIKADPVTGKAVHPIGSGPIGLDIGPQTLAYSAAGAAGLVGLADRVQNIEQEKRRLQRKMDRSRRAANPDNYAEDGTIRRGVKLTHYKSKRYRRSQQELKYLQHRQAEIRKLQHIQFANHLLSLGDHFYVEKMEWSSLTHRAKETVISEKTGKPRSKRRFGKSIANKAPAMLIEILRQKCKSLGLSDVVEINPADIKASQYNHLTGKYVKKSLSRRWNDMQDGEHLQRDLYSAFLLQHYDSCSKTLDHDSIVRDYPAFVQYHHREIERLHALPKTPSSMGIRRSIA

SEQ ID NO: 2107 - protein, 524 aa, unidentified
  REGION 1..524: note = Description of Unknown: uncultivated organism sequence
  REGION 1..524: note = Category: MG81 effectors
  REGION 1..524: note = Description: MG81-385 effector
MAKNNNTDTCVLTLPLRVEKWQEDCLLKRFEAARRIYNSLLNFELKKLRQLERTVEYRQIQSVISSAYRSNTKDSLECKDAFKRREKLISANGISENGFKSDVKFFYKYFDGLIGSSVAVHCIAVQLWAAFDKYLSGSGKEIHFKRLGDISSLKGYSVKGKSGGLEIIFRGQYVEWTRKKKKLLLPLKIDPDNEYEREMLSRRVKYVRIIKKPGKNRLRWYAQLTLEGKPALKYSAETGKPIHSVGKGNVGIDIGPQTVAYASDKEVALLELADRVTNIEHQKKKLQRKLDRSRRATNPDNYKPDGTIKRGVKLTRNKSKRYLKLQSKLAYIQHRQAEIRKLQHTCLANHMLTLGDRFFVEKMNWPGLAHRAKETSISEKTGRYKRKKRFGKSLANKAPAMFISILKRKCETLGLPGVVEVDTYNLKASQYNHLSDTYEKKSLSERWNYMPISDGSDSSKTKRIQRDLYSAFLLQHTIPQPCSFDKEALRIDYPNFVTMHDAEIHRLESLPKTITSMGVRRSHS

SEQ ID NO: 2108 - protein, 511 aa, unidentified
  REGION 1..511: note = Description of Unknown: uncultivated organism sequence
  REGION 1..511: note = Category: MG81 effectors
  REGION 1..511: note = Description: MG81-386 effector
MAKCSTDTCCLTLPLRLEKWQEDRLAKRFEIARQIYNTMVRAELKKLRAMEQSEPYKANQEKIQALDWKTQADKQALKALYKERDKLLRDGGFSEYGFKSDIKNYYKHFNNNIGSSVAVHGIAPQVWAAFEKMLFKKEGKKVHFKKKGDIHSLRGYSVTGKSGGVEIIFRETYIEWKGLKLPLKLSPDNIYETQMLSYRVKYVRLLRKPGKRKDRWYAQLSLEGKPVIKYNPKTGEVRHPIGKGAVGLDIGPQTLAYSAATGADLVELANQVQNVEQEKRRLQRKLDRSRRATNPGNYADDGTIRRGIALTHNKSKRYLRTQQELKYLQHQQAEIRKRQHTELANHLLSLGDCFYVEKMVWTSLTHRAKETEISEKTGKIKRKKRFGKSVANKAPATLIEILQRKSAALGIPGVIEVPTSVKASQYNHQSGTYTPKPLSQRWNNMPDGERIQRDLYSAFLLQHYDPQTNTFDANSLHQDYPQFVQYHHDAVLRLYAMPKAPSSMGIKRSLR

SEQ ID NO: 2109 - protein, 511 aa, unidentified
  REGION 1..511: note = Description of Unknown: uncultivated organism sequence
  REGION 1..511: note = Category: MG81 effectors
  REGION 1..511: note = Description: MG81-387 effector
MREDSQNTCCLTLPLKIEKWQADRLIKRFEIARQIYNTLVHAELKKLQKMEASAEYRKIQDRIRELNPSDVRAKKEWKILKDKQEKLWKAWKITEYGFKSDIKAYYKYFNENIGSAVATHDIAPRVWAAFEKKLNDRTGKVKIQYKKAGDIRSLKGFSVSGKSGGTEIIFHKTYIAWKGLTLPLKLSPDNAYEKEMLMRRIKYVRILRKPGKHKDRWYAQLSLEGNPVVKLDPVSGLPRHPIGKGAVGIDIGPQTLAYSAEGGADLVELADQVQCIEQEKSRLQRKMDRSRRASNPDNYAQDGTIKRGVKLTHNKSRRYCKLQKELAYMLYRQAETRKRQHRELINRLLTMGDCFYIEDMHWNSLAHRAKKTEISEKTGRYKRKKRFGKSIANKAPAMLVDMLEQKCKSLELDVVMVNTSLKASQYNHQTGKYEKKTLSQRWNHMPDGEQIQRDLYSAFLLQHVVPEKNAFDNEALCRDYPKFVQYHHEVIERLRSLPKTISCMGIRRSVS

SEQ ID NO: 2110 - protein, 534 aa, unidentified
  REGION 1..534: note = Description of Unknown: uncultivated organism sequence
  REGION 1..534: note = Category: MG81 effectors
  REGION 1..534: note = Description: MG81-388 effector
MGWKSKGRGGTLVKRSSTDTCCLTLPLKLEKWQSDRLEKRFEIGRQIYNTIVHAELKKLRKLERTQQYQEIEQKLENAKQEETKELWKKKRQLLDQNGLSENHFKADMKYYYPHFKDNIASSVAVHGIASQAWTAFEKVLLSKDGKMVHFKKKGELSSLRGYSQAGKSGGIEIIFRGSYVEWKGLKLPLQLSPNNEYETEMLSKRVKYVRILRKDGKTKTHWYAQLALEGKPAVKRDSISGAPKHPVGHGVVGIDIGTRTLAYSTDSEVNLLELADRVQNIEQEKRRLQRKMDRSRRAMNPGNYKPDGSIKQGVKLTWNNSKRYKRIQHQYAMIQHHQADIRKQQHNELANYLLTLGDCFFVENMSYCDLAHRANKTEISEKTGRYKRKKRFGKSIANKAPAMLITMLKQKCQSRGLEGVKEVDTHVCASQYNHQTDTWIKKALENRWNIMPDGERIQRDLYSAFLLQHCRRDLPEYNRKELQKEFGEELYRVFDREALQRDYPQFVAYHHMTIQRLSELPHTIPSMGIRRIIS

SEQ ID NO: 2111 - protein, 538 aa, unidentified
  REGION 1..538: note = Description of Unknown: uncultivated organism sequence
  REGION 1..538: note = Category: MG81 effectors
  REGION 1..538: note = Description: MG81-389 effector
MDNEEKEKDGATCCLTLPLKLEKWQSDHLEKRFEIARQLYNTLVHAELKKKCQVERMPEYQEIMKMIDAASNQKEKWALEKKRKAFLEENGFSRNAFKADMEKYYKHFNDNIGANVALHGITAQVWIAFDKVFVDNYKQKGKVHFKKPGELCSVQGYSQKKSGGKEIMFREDRIIWNQQGNRDRKKVKREFLLKLSPDNPYEAEMLKRHVKFVRILRKDGKTKPHWYAQLVLEGKPAVKRDPASGAPKHPIGHGVVGIDIGTRTLAYSTDKEVNLLELADHVQNIEQEKRRLQRKMDRSRRATNPENYNPDGTFKRGVKLTRNKSKRYRRIQHQLAMIQHHQADIRKQQHNELANYLLTLGDCFFVENMSYCDLAHRANKTEISEKKGRYKRKKRFGKSIANKAPAMLITMLKQKCQSRGLEGVKEVDTHVCASQYNHQTDTCIKKALENRWNIMPDGERIQRDLYSAFLLQHCRRDLPEYNRKELQKEFGEELYRVFDREALQRDYPQFVAYHHMTIQRLSELPHTIPSMGIRRIIS

SEQ ID NO: 2112 - protein, 463 aa, unidentified
  REGION 1..463: note = Description of Unknown: uncultivated organism sequence
  REGION 1..463: note = Category: MG81 effectors
  REGION 1..463: note = Description: MG81-390 effector
MNNEEKEKDGATCCLTLPLKLEKWQSDHLEKRFEIARQLYNTLVHAELKRIHRIERMPEYREIERQIEATTDKKEKWALKNQKKQFLRKNGINRNTFTTDMKRLYKHFNDNIGSNVAQHGIVSQVLTAFEKVYIENQSGEVHFKKPGDLRSVQGYSQKKSGGVEIMFREGKIIWNQQGNNDRKGVAREFPLKLSPDNSYEAEMLKKHVKFVRILRKDGKTKPHWYAQLVLEGKPAIKRDPASGAPKHPIGHGVVGIDIGTRTLAYSADSKVDLIELADRVQNIEQEKLLLQRKLDRSRRATNPENYKPDGTIKKGVKLTWNNSKRYKRIQHQYAMIQHHQADIRKQQHNELANYLLTLGDCFFVEDMDYRALTRKAKKTEISEKTGRYKRKKRFGKSIANKAPSMLITLLDQKCKSLNLEGVKKVDTAVKASQYNHQTDECKAKELKERWNIMPDGERIQRDL

SEQ ID NO: 2113 - protein, 388 aa, unidentified
  REGION 1..388: note = Description of Unknown: uncultivated organism sequence
  REGION 1..388: note = Category: MG81 effectors
  REGION 1..388: note = Description: MG81-391 effector
MVHFKKKGELSSLRGYSQAGKSGGIEIIFRGSYVEWKGLKLPLKLSSNNDYETEMLSKRVKYVRILRQDGKTKPHWYAQLVLEGKPAVKRDPISGAPKHPIGHGAVGIDIGTRTLAYSADSKVDLIELADRVQNIEQEKLLLQRKLDRSRRATNPENYKPDGTIKKGVKLTRNKSKRYRKIQHQLAMLQHRQANIRKRQHNELANYLLTLGDCFFVEDMDYRALTRKAKKTEISEKTGRYKRKKRFGKSIANKAPSMLIALLDQKCKSLNLEGVKKVDTAVKASQYNHQTDECKAKELKERWNIMPDGERIQRDLYSAFLLQHCKRGLPEYNRKKLQEAFGNELYRVFDREALQRDYPKFVEYHRETIQRLSALPKTIASMGIRRIIS

SEQ ID NO: 2114 - protein, 508 aa, unidentified
  REGION 1..508: note = Description of Unknown: uncultivated organism sequence
  REGION 1..508: note = Category: MG81 effectors
  REGION 1..508: note = Description: MG81-392 effector
MADKECCVLTLPLQTEIWQEHIIEKRFAIMEHLKNQLIAKELRRLKNLERTKEYRNLIDEINNTPKEKRKALFSKRRKLLKDSGFSEYDFKDDIAGKNSLMQKHFIEHIATQIAHKLASDVWRSFDKFLFGNGRFIHFSKRGSLRSVASQKNGNGMTYKNGYFIWSGGQSKNKIILKIKVTPPKNEYEKEMLSKKIKYLRIVKKWVKTRYKYYLQFALEGKPVKKDRIVNKGNVGIDIGTQTVAISSADSVKILELADKIDKNHTKKKILQRKMDRSRRYTNPQNYNEDGTIKKPPKGQRFSWYKSKKYIQLAGKVRELERKNADIRKYQHTCLANWILSLGDTVYVEQMNFSGLQRRAKETKIDKNGKYAKKKRYGKSLANKAPSMFLTILESKLNQYGGQLNKINTYEFKASQYDHTDDTFTKHNRSERWHILSNGDKNQRDLYSAFLIMNSDISLKHCNREKCNETYSNFKVLQDKEIERLYSDIRKGNCKNISSFGFQRNAKAM

SEQ ID NO: 2115 - protein, 516 aa, unidentified
  REGION 1..516: note = Description of Unknown: uncultivated organism sequence
  REGION 1..516: note = Category: MG81 effectors
  REGION 1..516: note = Description: MG81-393 effector
MKKSNTDTCCLTLPLKLEKWQEDRLAKRFEIARQIYNTMVHAELKKLRNIENSQPYRQIQKQIEALNWKNQNDKARLKSLYNDRNKLLNTIGFSEYGFKADIKYYYKHFNDNIGSSVAVHGIAPQVWAAFEKMLFHKEGKKVHYKKKDDIHSLHGYSVTGKSGGVEIIFRKTYIEWKGLKLPLKRSPDNAYETEMLDRRVKYVRLLRKPGKRKDCWYAQLSLKGKPAIKRDPESGKRRHSIGRGAVGLDIGPQTLAYSACGAADLVELADQVQNIEQMKRRLQRKLDRSRRATNPDNYADNGTIRRGVKLTHNKSNRYRRTQRELRYLQHCQAEIRKRQHIELANHLLALGDCFYVEDMAWPSLTHRAKETAISEKTGRIKRKKRFGKSVANKAPATLIGILEQKCNSLGLPGVVKVPTSLRASQYNHQSGEYTSKPLSQRWNNMPDGERIQRDLYSAFLLQHYDPKAGNFDSVLLQQDYPQFVQYHHRAIQRLSTVPKHSPAWEFKEVFDSAKII

SEQ ID NO: 2116 - protein, 508 aa, unidentified
  REGION 1..508: note = Description of Unknown: uncultivated organism sequence
  REGION 1..508: note = Category: MG81 effectors
  REGION 1..508: note = Description: MG81-394 effector
MADKECCVLTLPLQTEIWQEHIIEKRFAIMEHLKNQLIAKELRRLKNLERTKEYRNLIDEINNTPKEKRKALFSKRRKLLKDSGFNRNKFKDDMAVMQKHFEEHIATQIAQEAASDVWRSFDKYLFNNGKYIHFTRKGSLSSINCQKINNGMKYIDGYFIWTCGICSGKRDRRIILKIKVTPPKNEYEKEMLSKKIKYLRIVKKWVKTRYKYYLQFALEGKPVKKDRIVNKGNVGIDIGTQTVAISSADSVKILELADKIDKNHTKKKILQRKMDRSRRYTNPQNYNEDGTIKKPPKGQRFSWYKSKKYIQLAGKVRELERKNADIRKYQHTCLANWILSLGDTVYVEQMNFSGLQRRAKETKIDKNGKYAKKKRYGKSLANKAPSMFLTILESKLNQYGGQLNKINTYEFKASQYDHTDDTFTKHNRSERWHILSNGDKNQRDLYSAFLIMNSDISLKHCNREKCNETYSNFKVLQDKEIERLYSDIRKGNCKNISSFGFQRNAKAM

SEQ ID NO: 2117 - protein, 524 aa, unidentified
  REGION 1..524: note = Description of Unknown: uncultivated organism sequence
  REGION 1..524: note = Category: MG81 effectors
  REGION 1..524: note = Description: MG81-395 effector
MAKNNNTDTCVLTLPLRVEKWQEDCLLKRFEAARRIYNSLLNFELKKLRQLERTVEYRQIQSVISSAYRSNTKDSPECKDAFKRREKLISANGISEYGFKSDVKFFYKHFDGLIGSSVAVHCIAVQLWAAFDKYLRGSGKEIHFKRLGEISSLKGYSVKGKSGGLEIIFRGQYVEWTRKKKKLLLPLKIDPDNEYEREMLSRRVKYVRIIKKPGKNRLRWYAQLTLEGKPALKYSAETGKPIHSVGKGDVGIDIGPQTVAYASDKEVALLELADRVTNIEHQKKKLQRKLDRSRRATNPDNYKPDGTIKRGVKLTRNKSKRYLKLQSKLAYIQHRQAEIRKLQHTCLANHMLTLGDRFFVEKMNWPGLAHRAKETSISEKTGRYKRKKRFGKSLANKAPAMFISILKRKCETLGLPGVVEVDTFRLKASQYNHLSDTYEKKSLSERWNYMPISDGSDSSKTKRIQRDLYSAFLLQHTIPQPCSFDKEALREDYPNFVTMHDAEIHRLEYLPKTITSMGVRRSHS

SEQ ID NO: 2118 - protein, 511 aa, unidentified
  REGION 1..511: note = Description of Unknown: uncultivated organism sequence
  REGION 1..511: note = Category: MG81 effectors
  REGION 1..511: note = Description: MG81-396 effector
MSKRNTTDTCCLTLPLKLEKWQEDRLSKRFEIARQIYNTLVHAELKKLRQVEQSAEYRQIQVQLREMYQNNTTKTKEFRDIANHRRKLLDAAGFREYDFKSAIKDYYKYFKENIGSNVAIHGIAPLVWTAFENKLYKNGKKVHYKRPGDIYSLRGYSVTGKSGGSEIMFRGTYVEWKGLKLPIKRLPDNDYETAMLEYRVKYVRILRKPGKHKNYWYAQLSLEGKPVIKMNPVSNEPVHPIGSGAVGIDIGPQTIAYASQSEAGLLELASQVQNIERQKGLLQRKMERSRRDMNPENYMPDGTFRRGVKLTKNKSKHYCKLQRELAYLQHRQAETRKRQHIELANHLLSLGDCFYVEDMKWLSLTHRAKETEISEKTGRIKRKKRFGKSIANKAPATLIGILDTKCKSLGIPGVVKVPTIIKASQYNHQSDTYEKKPLGQRWNDMPSGERIQRDLYSAFLLQHLEPDLTGYNKKMLAQDYPQFVEYHNHVINDLSMKPKTLASMGIRRRVS

SEQ ID NO: 2119 - protein, 1355 aa, unidentified
  REGION 1..1355: note = Description of Unknown: uncultivated organism sequence
  REGION 1..1355: note = Category: MG81 effectors
  REGION 1..1355: note = Description: MG81-397 effector
MKISKIKNSRPGISVAENKNEEPLSRQSLLYYAPVKDGKIRLESKDLEQHVTECNEKAQKLYNVITPEINFYRDENRQKMVENLAKNFNAVINNALRSIRNPKEKKEQRVEKEVAFILNLSKKSIKMKKDVFVKSTDLIVKFPENNKYNKKNDKGTGSKEADIQRIISDLVLRKLKKTLRKEVKLENGYRMQMTEITISLMSAICLYGNAESFDPAILKAFFEKVDSDYTKYKYVEQIVKSIESQSAKLKVIEKDGRHLLISANADHRKKKYVFEFMRMYAAADEKEKRELTEHIQDLIGLYLCGKAGYENAENRFSDMIESHNCICGKIEEILNELEKPENLSQQKKENLKNTTVKVMALKYRAAVNYLADEVGKTVLGEIREKKVRSCADLYWIEYIDSTVEKLLLKSRNKKRYRYEIGFLSKHIWKEWTQYISGKYIEIGKGVYHFAIPDLSGALEGESVSICEVKPEYRNGVSGFDYERIRAEESLEREMEKYVLFAVNNFARAVTPEEEREKSGHEDVLLMKTLSEIEESQTKEERQKKHDNNVKNAITLYADADRRILQFFGGQSRFREKEDSLINLYSGEDLYKEIRKELYAIRNITFHYTTKAEKDQTQKHDLAEYLFEEEFSDITELFREKYYANNVWKYYDAEVINTIMENIYCGRKYRAAQVPAFKNIISRPELPQVMNGFVKGNSLRRLMNCPDRDVINKYWSALFFVLKELYYYDFLQEQKKPEDNVKERFFRAIKKLSGQEKDDEKQKAWESFGNRIDQIGRDRSFGAICQGLMIEYMLQNSDISMVQTETDNGKANNKKQIYKHYRTLLYNCISEAFIEYLREKWKELRTPVLTAKEWSKEEFCRVDGLKHLSLFDHLKETFNDAESGSSWYMAAHFINQKYLNHLLGSIRNYLQFTEDIEDRAISLGDCVDNKREEKNLRYRNTLEILEFVAQFCERTTNVMEDYFESNQEYAEYLSDFVDYNTTKKETDIEKALYSFCKQKFKVDGKEYMAGIYYDGENLIPNRNIIRANMYGNTSCLKPCMDRITLKEIRTMYADQNKLDLVLKEGVCHTEEEQKAYREYQNEKNRIELFDVCTYTQILNDMQARLIGWSYMRERDLMYYQLGYYYTKLFWTDSISEEDARRRLVGNLVNVEDGAILYQILAFNSYNLPIIANKNNTVTLLKDEGSIGGKAITAFFKNYENAEMIYKEALDLFENMDEHAAIINTRNYIEHFKYFIKSDRSMMDLYSEIYDRFFRHDHNRKKNVPDSLKNVLADNFMIVDIDMELGSKKVGEKKKGFREHKAARIEFTDSGIRSTDMTYTIKPDIKDNKKVLVPARSEVFLKQFRKILEYRIQDKTQ

SEQ ID NO: 2120 - protein, 529 aa, unidentified
  REGION 1..529: note = Description of Unknown: uncultivated organism sequence
  REGION 1..529: note = Category: MG81 effectors
  REGION 1..529: note = Description: MG81-398 effector
MILLANNNNNNTDTCVLTLPLRVEKWQEDCLLKRFEAARRIYNSLLNFELKKLRQLERTVEYRQIQSVISSAYRSNTKDSPECKDAFKRREKLISANGISEYGFKSDVKFFYKHFDGLIGSSVAVHCIAVQLWAAFDKYLSGSGKEIHFKRLGDISSLKGYSVKGKSGGREIIFRGQYIEWTRKKKKLLLPLKIDPDNEYEREMLSRRVKYVRIIKKPGKNRLRWYAQLTLEGKPALKYSAGTGKPIHSVGKGDVGIDIGPQTVAYASDKEVALLELADRVTNIEHQKKKLQRKLDRSRRATNPDNYKPDGTIKRGVKLTRNKSKRYLKLQSKLAYIQHRQAEIRKLQHTCLANHMLTLGDRFFVEKMNWPGLAHRAKETSISEKTGRYKRKKRFGKSLANKAPAMFISILKRKCETLGLPGVVEVDTYSLKASQYNHLSDTYEKKSLSERWNYMPISDGSDSSKTKRIQRDLYSAFLLQHTIPQPCSFDKEALRIDYPNFVTMHDAEIHRLESLPKTVTSMGVRRSHS

SEQ ID NO: 2121 - protein, 508 aa, unidentified
  REGION 1..508: note = Description of Unknown: uncultivated organism sequence
  REGION 1..508: note = Category: MG81 effectors
  REGION 1..508: note = Description: MG81-399 effector
MADKECCVLTLPLQTEIWQEHIIEKRFAIMEHLKNQLIAKELRRLKNLERTKEYRNLIDEINNTPKEKRKALFSKRRKLLKDSGFSEYDFKDDIAGKNSLMQKHFIEHIATQIAHKLASDVWRSFDKFLFGNGRFIHFSKRGSLRSVASQKNGNGMTYKNGYFIWNGGQSKNKIILKIKVTPPKNEYEKEMLSKKIKYLRIVKKWVKTRYKYYLQFALEGKPVKKDRIVNKGNVGIDIGTQTVAISSADSVKILELADKIDKNHTKKKILQRKMDRSRRYTNPQNYNEDGTIKKPPKGQRFSWYKSKKYIQLAGKVRELERKNADIRKYQHTCLANWILSLGDTVYVEQMNFSGLQRRAKETKIDKNGKYAKKKRYGKSLANKAPSMFLTILGSKLNQYGGQLNKINTYEFKASQYDHTDDTFTKHNRSERWHILSNGDKNQRDLYSAFLIMNSDISLKHCNREKCNETYSNFKVLQDKEIERLYSDIRKGNCKNISSFGFQRNAKAM

SEQ ID NO: 2122 - protein, 511 aa, unidentified
  REGION 1..511: note = Description of Unknown: uncultivated organism sequence
  REGION 1..511: note = Category: MG81 effectors
  REGION 1..511: note = Description: MG81-400 effector
MGKSSTDTCCLTLPLKLEKWQEDRLAKRFEIARQIYNTMVRAELKKLDRVKQLPEYRKNQKEIQALDWKNSADKQRLKELYGNQRKILQKQGFTEYGFKADSKDYYKHFIENIGSSVATHGIAPQVWNAFDKMLFQKDGKVVHFKRYGDVHSLKGGSVAHKSGGAEIMFRKTYIEWKGLKLPLKLSPDNAYEAEMLSYHVKYVRILRTRGKTKDRWYAQLSLEGKPAVKYDSNTGKPVHPVGKGAVGLDIGPQTLAYVAANEANLVELADQVQNIEQEKRRLQRKLDRSRRATNPDNYNENGTIRRGVKLTHNKSKRYCKLQKELSWIQHCQAETRKRQHIALANHLLSLGDCFYVEPMAWPSLTHRAKKTEVSEETGRIKRKKRFGKSVANKAPASLIGILKLKCISLGLTGVVEVPMLLRASQYNHQSKDYAKKSLSQRWNDMPDGNRIQRDLYSAFLLQHYDSQSESFDQETLERDYPQFVRLHNQTIQRLSALPKTPSSMGIRRSVS

SEQ ID NO: 2123 - protein, 522 aa, unidentified
  REGION 1..522: note = Description of Unknown: uncultivated organism sequence
  REGION 1..522: note = Category: MG81 effectors
  REGION 1..522: note = Description: MG81-401 effector
MKRSSTDTCCLTLPLKLEKWQSDRLEKRFEIGRQIYNTIVHAELKKLRKLERTQQYQEIEQKLENAKQEETKELWKKKRQLLDQNGLSENHFKADMKYYYPHFKDNIASSVAVHGIASQAWTAFEKVLLSKDGKMVHFKKKGELSSLRGYSQAGKSGGIEIIFRGSYVEWKGLKLPLQLSPNNEYETEMLSKRVKYVRILRKDGKTKTHWYAQLALEGKPAVKRDSISGAPKHPVGHGVVGIDIGTRTLAYSTDSEVNLLELADRVQNIEQEKRRLQRKMDRSRRAMNPGNYKPDGSIKQGVKLTWNNSKRYKRIQHQYAMIQHHQADIRKQQHNELANYLLTLGDCFFVENMSYCDLAHRANKTEISEKTGRYKRKKRFGKSIANKAPAMLITMLKQKCQSRGLEGVKEVDTHVCASQYNHQTDTCIKKALENRWNVMPDGERIQRDLYSAFLLQHCRRDLPEYNRKELQKEFGEELYRVFDREALQRDYPRFVAYHHMTIQRLSELPHTIPSMGIRRIIS

SEQ ID NO: 2124 - protein, 546 aa, unidentified
  REGION 1..546: note = Description of Unknown: uncultivated organism sequence
  REGION 1..546: note = Category: MG81 effectors
  REGION 1..546: note = Description: MG81-402 effector
MGWKSTGRGGKRVKRSSTDTCCLTLPLKLEKWQSDHLEKRFEIARQLYNTLVHAELKKKCQVERMPEYQEIMKMIDAASNQKEKWALEKKRKAFLEENGFSRNAFKADMEKYYKHFNDNIGANVALHGITAQVWIAFDKVFVDNYKQKGKVHFKKPGELCSVQGYSQKKSGGKEIMFREDRIIWNQQGNRDRKKVKREFLLKLSPDNPYEAEMLKRHVKFVRILRKDGKTKPHWYAQLVLEGKPAVKRDPASGAPKHPIGHGVVGIDIGTRTLAYSTDSEVNLLELADRVQNIEQEKRRLQRKMDRSRRAMNPGNYKPDGSIKQGVKLTWNNSKRYKRIQHQYAMIQHHQADIRKQQHNELANYLLTLGDCFFVENMSYCDLAHRANKTEISEKTGRYKRKKRFGKSIANKAPAMLITMLKQKCQSRGLEGVKEVDTHVCASQYNHQTDTCIKKALENRWNIMPDGERIQRDLYSAFLLQHCRRDLPEYNRKELQKEFGEELYRVFDREALQRDYPQFVAYHHMTIQRLSELPHTIASMGIRRSIS

SEQ ID NO: 2125 - protein, 566 aa, unidentified
  REGION 1..566: note = Description of Unknown: uncultivated organism sequence
  REGION 1..566: note = Category: MG81 effectors
  REGION 1..566: note = Description: MG81-403 effector
MGWKSKGRGGKRVDNEEKEKDGATCCLTLPLKLEKWQSDHLEKRFEIARQLYNTLVHAELKRIHRIERMPEYREIERQIEATTDKKEKWALKNQKKQFLRKNGINRNTFTTDMKRFYKHFNDNIGSNVAQHGIVSQVLTAFEKVYIENQSGEVHFKKPGDLRSVQGYSQKESGGKEIMFRNGKIIWTQQENDDRKKSPKYQQRKKRQNYKGVKGIAREFPVVFSKNNPYEAEMLTKHVKFVRILRKDGKTKPHWYAQLVLEGKPAVKRDPISSAPKHPVGHGVVGIDIGTRTLAYSTDKEVNLLELADRVQNIEQEKRRLQRKMDRSRRAMNPENYNSDGTFKRGVKLTRNKSKRYRRIQHQLAMIQHHQADIRKQQHNELANYLLTLGDCFFVENMSYCDLVHRANKTEISEKTGRYKRKKRFGKSIANKAPAMLITMLKQKCQSRGLKGVKEVDTHVRASQYNHQTDTCIEKALENRWNIMPDGERIQRDLYSAFLLQHCKQGLPEYNRKELKKEFGEELYRVFDREALQRDYPQFVAYHHMTIQRLSELPHTIPSMGIRRIIS

SEQ ID NO: 2126 - protein, 534 aa, unidentified
  REGION 1..534: note = Description of Unknown: uncultivated organism sequence
  REGION 1..534: note = Category: MG81 effectors
  REGION 1..534: note = Description: MG81-404 effector
MGWKSKGRGGKRVKKSSTDTCCLTLPLKLEKWQSDRLEKRFEIGRQIYNTVVRAELKKLHQVERTPQYREIEQKLKEAKQEEAKELWKKRTQLLSKSGFSEYGFKSDMKYYYQHFKENIGSSVAVHGIASQVWTAFEKVLFSKDGKMVHFKKKGELSSLRGYSQAGKSGGIEIIFRGSYVEWKGLKLPLKLSSNNDYETEMLSRRVKYVRILRQDGKTKPHWYAQLVLEGKPAVKRDPISGASKHPIGHGAVGIDIGTRTLAYSADSKVDLIELADRVQNIEQEKLLLQRKLDRSRRATNPENYKPDGTIKKGVKLTRNKSKRYRKIQHQLAMLQHRQANIRKRQHNELANYLLTLGDCFFVEDMDYRALTRKAKKTEISEKTGRYKRKKRFGKSIANKAPSMLIALLDQKCKSLNLEGVKKVDTAVKASQYNHQTDECKAKELKERWNIMPDGERIQRDLYSAFLLQHCKRGLPEYNRKKLQEAFGNELYRVFDREALQRDYPKFVEYHRETIQRLSALPKTIASMGIRRIIS

SEQ ID NO: 2127 - protein, 511 aa, unidentified
  REGION 1..511: note = Description of Unknown: uncultivated organism sequence
  REGION 1..511: note = Category: MG81 effectors
  REGION 1..511: note = Description: MG81-405 effector
MKKSNTDTCCLTLPLKLEKWQEDRLAKRFEIARQIYNTMVHAELKKLRNVENSQPYRQIQKQIEALNWKNQNDKARLKSLYNDRNKLLNTIGFSEYGFKADIKYYYKHFNDNIGSSVAVHGIAPQVWAAFEKMLFHKEGKKVHYKKKDDIHSLHGYSVTGKSGGVEIIFRKTYIEWKGLKLPLKRSPNNAYETEMLGRRVKYVRLLRKPGKRKDCWYAQLSLEGKPAIKRDPESGKRRHSIGRGAVGLDIGPQTLAYSACGAADLVELADQVQNIEQMKRRLQRKLDRSRRATNPDNYADNGTIRRGVKLTHNKSNRYRRTQRELRYLQHCQAEIRKRQHIELANHLLALGDCFYVEDMAWPSLTHRAKETAISEKTGRIKRKKRFGKSVANKAPATLIGILEQKCNSLGLPGVMKVPTSLRASQYNHQSGEYTSKPLSQRWNNMPDGERIQRDLYSAFLLQHYDPKAGNFDSALLQQDYPQFVQYHHRAIQRLSTVPKTLSSMGIQRSLR

SEQ ID NO: 2128 - protein, 538 aa, unidentified
  REGION 1..538: note = Description of Unknown: uncultivated organism sequence
  REGION 1..538: note = Category: MG81 effectors
  REGION 1..538: note = Description: MG81-406 effector
MNNEEKEKEGATCCLTLPLKLEKWQSDHLEKRFEIARQLYNTLVHAELKKKCQVERMPEYQEIMKMIDTASNQKEKWALEKKRKAFLEENGFSRNAFKADMEKYYKHFNDNIGANVALHGITAQVWIAFDKVFVDNYKQKGKVHFKKPGELCSVQGYSQKKSGGKEIMFREDRIIWNQQGNRDRKKVKREFLLKLSPDNPYEAEMLKRHVKFVRILRKDGKTKPHWYAQLVLEGKPAVKRDPASGAPKHPIGHGVVGIDIGTRTLAYSTDKEVNLLELADRVQNIEQEKRRLQRKMDRSRRAMNPENYNSDGTFKRGVKLTRNKSKRYRRIQHQLAMIQHHQADIRKQQHNELANYLLTLGDCFFVENMSYCDLVHRANKTEISEKTGRYKRKKRFGKSIANKAPAMLITMLKQKCQSRGLEGVKEVDTHVRASQYNHQTDTCIEKALENRWNVMPDGERIQRDLYSAFLLQHCKQGLPEYNRKELKKEFGEELYRVFDREALQRDYPQFVAYHHMTIQRLSELPHTIASMGIRRSIS

SEQ ID NO: 2129 - protein, 336 aa, unidentified
  REGION 1..336: note = Description of Unknown: uncultivated organism sequence
  REGION 1..336: note = Category: MG81 effectors
  REGION 1..336: note = Description: MG81-407 effector
MAKCSTDTCCLTLPLRLEKWQEDRLAKRFEIARQIYNTMVRAELKKLRAMEQSEPYKANQEKIQALDWKTQTDKQALKALYKERDKLLRDGGFSEYGFKSDIKNYYKHFNNNIGSNVAFHGIAPQVWAAFEKMLFKKEGKKVHFKKKGDIHSLRGYSAAGKSGGVEIIFRETYIEWKGLKLPLKLSPDNIYETQMLSYRVKYVRLLRKPGKRKDRWYAQLSLEGKPVIKYNPKTGEVRHPIGKGAVGLDIGPQTLAYSAATGADLVELANQVQNVEQEKRRLQRKLDRSRRATNPGNYADDGTIRRGIALTHNKSKRYLRTQQELKYLQHQPASAS

SEQ ID NO: 2130 - protein, 522 aa, unidentified
  REGION 1..522: note = Description of Unknown: uncultivated organism sequence
  REGION 1..522: note = Category: MG81 effectors
  REGION 1..522: note = Description: MG81-408 effector
MKKSSTDTCCLTLPLKLEKWQSDRLEKRFEIGRQIYNTVVRAELKKLHQLERTPQYREIEQKLKEAKQEEAKELWKKRTQLLSQSGFSEYGFKSDMKYYYQHFKENIGSSVAVHGIASQVWTAFEKVLFSKDGKMVHFKKKGELSSLRGYSQAGKSGGVEIIFRGSYVEWKGLKLPLKLSPNNDYETEMLSKRVKYVRILRQEGKTKPHWYAQLVLEGKPAIKRDPASGAPKHPVGHGVVGLDIGTRTLAYSADDKVDLLELADRVQNIEQEKMLLQRKLDRSRRATNPENYKPDGTIKKGVKLTRNKSKRYRKIQHQLAMLQHRQADIRKRQHNELANYLLTLGDCFFVEDMDYRALTRKAKKTEISEKTGRYKRKKRFGKSIANKAPSMLIALLDQKCKSLNLEGVKKVDTAVKASQYNHQTDECKAKELKERWNIMPDGERIQRDLYSAFLLQHCKRGLPEYNRKELQKEFGEELYRVFDREALQRDYPQFVVYHHMTIQRLSALPKTIASMGIRRIIS

SEQ ID NO: 2131 - protein, 538 aa, unidentified
  REGION 1..538: note = Description of Unknown: uncultivated organism sequence
  REGION 1..538: note = Category: MG81 effectors
  REGION 1..538: note = Description: MG81-409 effector
MDNEGKEKDGATCCLTLPLKLEKWQSDHLEKRFEIARQLYNTLVHAELKKKCQVERMPEYQEIMKMIDAASNQKEKWALEKKRKAFLEENGFSRNAFKADMEKYYKHFNDNIGANVALHGITAQVWIAFDKVFVDNYKQKGKVHFKKPGELCSVQGYSQKKSGGKEIMFREDRIIWNQQGNRDRKKVKREFLLKLSPDNPYEAEMLKRHVKFVRILRKDGKTKPHWYAQLVLEGKPAVKRDPISGAPKHPVGHGVVGIDIGTRTLAYSTDKEVNLLELADRVQNIEQEKRRLQRKMDRSRRATNPENYNSDGTFKRGVKLTRNKSKRYRRIQHQLAMIQHHQADIRKQQHNELANYLLTLGDCFFVENMSYCDLVHRANKTEISEKTGRYKRKKRFGKSIANKAPAMLITMLKQKCQSRGLEGVKEVDTHVRASQYNHQTDTCIEKALENRWNIMPDGERIQRDLYSAFLLQHCKQGLLEYNRKELKKEFGEELYRVFDREALQRDYPQFVAYHHMTIQRLSELPHTIPSMGIRRIIS

SEQ ID NO: 2132 - protein, 554 aa, unidentified
  REGION 1..554: note = Description of Unknown: uncultivated organism sequence
  REGION 1..554: note = Category: MG81 effectors
  REGION 1..554: note = Description: MG81-410 effector
MNNEEKEKDGATCCLTLPLKLEKWQSDHLEKRFEIARQLYNTLVHAELKRIHRIERMPEYREIERLIEATTDKKEKWALKNQKKQFLRKNGINRNTFTTDMKRLYKHFNDNIGSNVAQHGIVSQVLTAFEKVYIENQSGEVHFKKPGDLRSVQGYSQKKSGGKEIMFRNGKIIWTQQENDDRKKSPKYQQRKKRQNYKGVKGIAREFPVVFSKNNPYEAEMLTKHVKFVRILRKDGKTKPHWYAQLVLEGTPVAKYDPISGAPKHPVGHGAVGIDIGTRTLAYSADSKVDLIELADRVQNIEQEKLLLQRKLDRSRRATNPGNYNPDGTIKCGVKLTRNKSKRYRKIQHQLAMLQHRQADIRKRQHNELANYLLTLGDCFFVEDMDYRALTRKAKKTEISEKTGRYKRKKRFGKSIANKAPSMLIALLDQKCKSLNLEGVKKVDTAVKASQYNHQTDECKAKELKERWNIMPDGERIQRDLYSAFLLQHCKRGLPEYNRKKLQETFGNELYRVFDREALQRDYPKFVEYHRKTIQRLSALPKTIASMGIRRIIS

SEQ ID NO: 2133 - protein, 522 aa, unidentified
  REGION 1..522: note = Description of Unknown: uncultivated organism sequence
  REGION 1..522: note = Category: MG81 effectors
  REGION 1..522: note = Description: MG81-411 effector
MKRSSTDTCCLTLPLKLEKWQSDRLEKRFEIGRQIYNTVVRAELKKLQQVERTPQYREIEQKLKGAKQEEAKELWKKRTQLLSKSGFSEYGFKSDMKYYYQHFKENIGSSVAVHGIASQVWTAFEKVLFSKDGKMVHFKKKGELSSLRGYSQAGKSGGVEIIFRGSYVEWKGLKLPLKLSPDNDYETEMLSKRVKYVRILRQDGKTKPHWYAQLVLEGKPAIKRDPASGAPKHPVGHGVVGIDIGTRTLAYSADSKVDLIELADRVQNIEQEKLLLQRKLDRSRRATNPENYKPDGTIKKGVKLTWNNSKRYKRIQHQYAMIQHHQADIRKQQHNELANYLLTLGDCFFVEDMDYRALTRKAKKTEISEKTGRYKRKKRFGKSIANKAPSMLIALLDQKCKSLNLEGVKKVDTAVKASQYNHQTDECKAKELKERWNIMPDGERIQRDLYSAFLLQHCRRDLPEYNRKKLQETFGNELYRIFDREALQRDYPKFVEYHRETIQRLSALPKTIASMGIRRSIS

SEQ ID NO: 2134 - protein, 511 aa, unidentified
  REGION 1..511: note = Description of Unknown: uncultivated organism sequence
  REGION 1..511: note = Category: MG81 effectors
  REGION 1..511: note = Description: MG81-412 effector
MGKSKTETCCLTLPLKLEKWQEDRLAKRFEIARQIYNTLVHAELKKLNQIERSSEYQTIQDQITNLDRNDPERIKELPSLYKKRTKLLRDAGFTEYGFKSDVKHYYKYFHKNIGSSVAVHGIAPQVWAAFEKKLFKKQGKIVHYKRKGTLRSVKGGSATGKSGGTEIIFRGTYIQWKDLNLPLKRSPDNAYESEMLGYRVKYVRILRKPGKSKNRWYAQLVLEGKPVIKRNPMTGAALHPVGHGAVGLDIGPQTLAYSAADGVGLLELADQVQNIERQKALLQRKLDRSRRASNPDNYNEDGTIKRGVKLTRNQSKRYCKTQRDLAYLQHCQAETRKRQHIALANHLLTLGDRFYVEQMSWVALARRSKKTEVSEKTGKIKRKKRFGKSIANKAPAMLIEILRQKCISLGLPGVVDVPTSIKASQYNHQSKDYIKKNLSERWNDMPDGEKIQRDLYSAFLLQHCTPELNAFDQESLQQDYPRFVQYHHQVMQQLSEMPKTPSSMGIRRRTS

SEQ ID NO: 2135 - protein, 534 aa, unidentified
  REGION 1..534: note = Description of Unknown: uncultivated organism sequence
  REGION 1..534: note = Category: MG81 effectors
  REGION 1..534: note = Description: MG81-413 effector
MGWKSKGRGGTLVKKSSTDTCCLTLPLKLEKWQSDRLEKRFEIGRQIYNTVVRAELKKLQQVERTPQYREIEQKLKEAKQEEAKELWKTRTQLLSKSGFSEYGFKSDMKYYYQHFKENIGSSVAVHGIASQVWTAFEKVLFSKDGKMVHFKKKGELSSLRGYSQAGKSGGIEIIFRGSYVEWKGLKLPLKLSPDNDYETEMLSKRVKYVRILRKEGKTKPHWYAQLVLEGKPAIKRDPASGAPKHPVGHGVVGIDIGTRTLAYSADSKVDLIELADRVQNIEQEKMLLQRKLDRSRRATNPENYKPDGTIKKGVKLTRNKSKRYRKIQHQLAMLQHRQADIRKRQHNELANYLLTLGDCFFVEDMDYRALTRKAKKTEISEKTGRYKRKKRFGKSIANKAPSMLIALLDQKCKSLNLEGVKKVDTAVKASQYNHQTDECKAKELKERWNIMPDGERIQRDLYSAFLLQHCRRDLPEYNRKKLQEAFGNELYRVFDREALQRDYPKFVEYHRKTIQRLSALPKTIASMGIRRSIS

SEQ ID NO: 2136 - protein, 508 aa, unidentified
  REGION 1..508: note = Description of Unknown: uncultivated organism sequence
  REGION 1..508: note = Category: MG81 effectors
  REGION 1..508: note = Description: MG81-414 effector
MADKECCVLTLPLQTENWQEHIIEKRFAIMEHLKNQLIAKELRRLKNLERTKEYRILIDEINNTPKEKRKALFSKRRKLLKDSGFNRNKFKDDMAVMQKHFEEHIATQIAQEAASDVWRSFDKYLFNNGKYIHFTRKGSLSSINCQKINNGMKYIDGYFIWTCGICSGKRDRRIILKIKVTPPKNEYEKEMLSKKIKYLRIVKKWVKTRYKYYLQFALEGKPVKKDRIVNKGNAGIDIGTQTVAISSADSVKLLELADKIDKNHTKKKILQRKMDRSRRYTNPQNYNEDGTIKKPPKGQRYCWYKSKKYIQLAGKVRELERKNADIRKYQHTCLANWILSLGDTVYVEQMNFSGLQRRAKETKIDKNGKYAKKKRYGKSLANKAPSMFLTILESKLNQYGGQLNKINTYEFKASQYDHTDDTFTKHNRSERWHILSNGDKNQRDLYSAFLIMNSDISLEHCNREKCNETYSNFKVLQDKEIERLYSDIRKGNCKNISSFGFQRNAKAM

SEQ ID NO: 2137 - protein, 508 aa, unidentified
  REGION 1..508: note = Description of Unknown: uncultivated organism sequence
  REGION 1..508: note = Category: MG81 effectors
  REGION 1..508: note = Description: MG81-415 effector
MADKECCVLTLPLQTEIWQEHIIEKRFAIMEHLKNQLIAKELRRLKNLERTKEYRNLIDEINNTPKEKRKALFSKRRKLLKDNGFNRNKFKDDMAVMQKHFEEHIATQIAQEAASDVWRSFDKYLFNNGKYIHFTRKGSLSSINCQKINNGMKYIDGYFIWTCGICSGKRDRRIILKIKVTPPKNEYEKEMLSKKIKYLRIVKKWVKTRYKYYLQFALEGKPVKKDRIVNKGNVGIDIGTQTVAISSADSVKILELADKIDKNHTKKKILQRKMDRSRRYTNPQNYNEDGTIKKPPKGQRFSWYKSKKYIQLAGKVRELERKNADIRKYQHTCLANWILSLGDTVYVEQMNFSGLQRRAKETKIDKNGKYAKKKRYGKSLANKAPSMFLNILESKLNQYGGQLNKINTYEFKASQYDHTDDTFTKHNRSERWHILSNGDKNQRDLYSAFLIMNSDISLKHCNREKCNETYSNFKVLQDKEIERLYSDIRKGNCKNISSFGFQRNAKAM

SEQ ID NO: 2138 - protein, 511 aa, unidentified
  REGION 1..511: note = Description of Unknown: uncultivated organism sequence
  REGION 1..511: note = Category: MG81 effectors
  REGION 1..511: note = Description: MG81-416 effector
MLVSKRSTTDTCCLTLPLRLEKWQADRLAKRFEIARQIYNTLVRAELKKLVRLERISAYKDIQQQLYSLYRDGHQNSREYKVLFQKRRSLLTEAGIREYGFKSDIAKYYKHFHENIGSSVAVHCIASQVWCAFDKYLFHNGKQVHFKRAGDIRSLKGYSVSGKSGGTEIIYRGTFIEWKGLRLPLKLDPDNRYEAEMLTKRVKYVRLLRTRGNHQDRWYAQLVLEGTPAVKHDAKTNALRHPIGHGAVGIDIGPQTIAYVAQDEAALMELANRVQNIEREKLLIQRKMDRSRRATNPDNYAVDGTIKRGVKLTRNKSKRYCTLQHRLAFIQSRQALIRKVQHTELANHLLSLGDRFYVENMEWSSLTHRASETAISEKTGRYKRKKRFGKSISNKAPATLIGILEQKCKSLGLPGVIKVPTKLCASQYNHMTDTREKKPLSQRWNDMPDGHRIQRDLYSAFLLQHVTPQEDGFDRPSLQRDYEKFVSLHDEVIRQLTLAPKTLSSMGIRRT

SEQ ID NO: 2139 - protein, 1358 aa, unidentified
  REGION 1..1358: note = Description of Unknown: uncultivated organism sequence
  REGION 1..1358: note = Category: MG81 effectors
  REGION 1..1358: note = Description: MG81-417 effector
MKISKIKNSRPGISVAENKNEESLSRQSLLYYAPVKDGKIRLESKDLEQHVTECNEKAQKLYNVITPEINFYRDENRQKMVENLARNFNAVINNALRSIRNPKEKKEQRVEKEVAFILNLSKKSIKMKKDVFVKSTDLIVKFPENNKYNKKNDKGTGSKEAYIQKMISDLVLRKLKNTLRKEVKLENGYRMQMTEIIISLMSAICLYGNAESFDPAILKAFFEKVDSDYTKYKYVEQIVKSIESQSAKLKVVEKDGRHLLISANADHRKKKYVFEFMRMYAAADEKEKRELTEHIQDLIGLYLCGKAGYENAENRFSDMTESHNCICGKIEEILNELEKPENLSQKKKENLKNTTVKVMALKYRAAVNYLADEVGKTVLGEIREKKVRSCADLYWIEYIDSTVEKLLLKSRNKDGYRYEIGFLSKHIWKEWTQYISGKYIEMGKGVYHFAIPDLSGNLEGEPISICEVKPEYRNGVSGFDYERIRAEESLEREMEKYVLFAVNNFARAVTPEEEREKSGHEDVLLMKTLSEIEESQTKEERQKKHDNNVKNAITLYADADRRILQFFGGQSRFREKEDSLINLYSGEDLYKEIRKELYAIRNITFHYTTKADKDQTQKHDLAEYLFEEEFSDITELFREKYYANNVWKYYDVEVINTIMENIYCGRKYRAAQVPAFKNIISRPELPQVMNGFVKGNSLRRLMNCPDRDVINKYWSALFFVLKELYYYDFLQEQKKPEDNVKERFFRAIEKLSGQENDDKKQKAWESFGNRIDQIGRDRSFGAICQGLMIEYMLQNSDISMVQTETDNGKANNKKQIYKHYRTLLYNCIREAFIEYLREKWEELRTPVLTVKEWSKEEFCRADGLKHLSLFDHLKKTFNDAESGSSWYMAAHFINQKYLNHLLGSIRNYLQFTEDIEDRAISLGDCVDNKREEKNLRYRNTLEILEFVAQFCERTTNVMEDYFESNQEYAEYLSGFVDYNTTKKETDIEKALYSFCKQKFKVDGKEYMAGIYYDGENLIPNRNIIRANMYGNTSCLKPCMDRITLKEIRTMYADQNKLDLVLKEGVCHTEEEQKAYREYQNEKNRIELFDVCTYTQILNDMQARLIGWSYMRERDLMYYQLGYYYTKLFWTDSISEEDARRRLVGNLVNVEDGAILYQILAFNSYNLPIIANKNNTVTLLKDEGSIGGKAITAFFKNYENAEMIYEEALDLFENMDEHAAIINTRNYIEHFKYFIKSDRSMMDLYSEIYDRFFRHDHNRKKNVPDSLKNVLADNFMIVDIDMELGSKKVGEKKKGFREHKAARIEFTDSGIRSTDMTYTIKPDIKDNKKDKKVLVPARSEVFLKQFRKILEYRIQDKIQ

SEQ ID NO: 2140 - protein, 530 aa, unidentified
  REGION 1..530: note = Description of Unknown: uncultivated organism sequence
  REGION 1..530: note = Category: MG81 effectors
  REGION 1..530: note = Description: MG81-418 effector
MILLAKNNNNNNTDTCVLTLPLRVEKWQEDCLLKRFEAARRIYNSLLNFELKKLRQLERTVEYRQIQSVISSAYRSNTKDSPECKDAFKRREKLISANGISENGFKSDVKFFYKHFDGLIGSNVAVHCIAVQLWAAFDKYLSGSGKEIHFKRLGDISSLKGYSVKGKSGGCEIIFRGQYVEWTRKKKKLLLPLKIDPDNEYEREMLSRRVKYVRIIKKPGKNRLRWYAQLTLEGKPALKYSAGTGKPIHSVGKGNVGIDIGPQTVAYASDKEVALLELADRVTNIEHQKKKLQRKLDRSRRATNPDNYKPDGTIKRGVKLTRNKSKRYLKLQSKLAYIQHRQAEIRKLQHTCLANHMLTLGDRFFVEKMNWPGLAHRAKETSISEKTGRYKRKKRFGKSLANKAPAMFISILKRKCETLGLPGVVEVDTYSLRASQYNHLSDTYEKKSLSERWNYMPISDGSDSSKTKRIQRDLYSAFLLQHTIPQPCSFDKKALRIDYPNFVTMHDAEIHRLESLPKTITSMGVRRSHS

SEQ ID NO: 2141 - protein, 322 aa, unidentified
  REGION 1..322: note = Description of Unknown: uncultivated organism sequence
  REGION 1..322: note = Category: MG81 effectors
  REGION 1..322: note = Description: MG81-419 effector
MCNEINMISWQKFQRPMSGFDLGYSAKGMSKMMAIPQRSIGCICTEYATRTKQFKKRKLNWRSYKKNTGWIPFATQQMKCFSDGIFFNGQKFKLWDYKPFDEKTIKSGSFQQDARGRWYVSITVEIEASSEIPKTGKAVGIDLGLKSLVTLSDGTVYDRVNLTEMYAKKLATAQLAGNLMQVRNIHAKIKNTRKNFYHEISLAIVKNYDEIYIGNISSSKLIKTKMAKSVSDAAWYDFKFMLKYKAERAGKKFVEVNESFSTVTCSSCLERTGPSGLSALGVRSWICSHCGAAHDRDVNAAKNILRSGQCADLRVKGSSLKN

SEQ ID NO: 2142 - protein, 384 aa, unidentified
  REGION 1..384: note = Description of Unknown: uncultivated organism sequence
  REGION 1..384: note = Category: MG81 effectors
  REGION 1..384: note = Description: MG81-420 effector
MVHFKKKGELSSLRGYSQTGKSGGIEIIFRGSYVEWKGLKLPLKLSPDNDYETEMLSKRVKYVRILRQDGKTKPHWYAQLVLEGKPAVKRDPISGAPKHPIGRGVVGIDIGTRTLAYSADSKVDLIELADRVQNIEQEKLLLQRKLDRSRRATNPENYKPDGTIKKGVKLTRNKSKRYRRIQHQLAMIQHHQADIRKQQHNELANYLLTLGDCFFVEDMDYRALTRKAKKTEISEKTGRYKRKKRFGKSIANKAPSMLIALLDQKCKSLNLEGVKKVDTAVKASQYNHQTDECKAKELKERWNIMPDGERIQRDLYSAFLLQHCRRDLPEYNRKKLQETFGNELYRVFDREALQRDYPKFVEYHRETIQRLSALPKTIASMGIS

SEQ ID NO: 2143 - protein, 538 aa, unidentified
  REGION 1..538: note = Description of Unknown: uncultivated organism sequence
  REGION 1..538: note = Category: MG81 effectors
  REGION 1..538: note = Description: MG81-421 effector
MDNEEKEKDGATCCLTLPLKLEKWQSDHLEKRFEIARQLYNTLVHAELKKKCQVERMPEYQEIMKMIDAASNQKEKWALEKKRKAFLEENGFSRNAFKADMEKYYKHFNDNIGANVALHGITAQVWIAFDKVFVDNYKQKGKVHFKKPGELCSVQGYSQKKSGGKEIMFREDRIIWNQQGNRDRKKVKREFLLKLSPDNPYEAEMLKRHVKFVRILRKDGKTKPHWYAQLVLEGKPAVKRDPASGAPKHPIGHGVVGIDIGTRTLAYSTDKEVNLLELADRVQNIEQEKRRLQRKMDRSRRAMNPGNYKPDGSIKQGVKLTWNNSKRYKRIQHQYAMIQHHQADIRKQQHNELANYLLTLGDCFFVENMSYCDLAHRANKTEISEKTGRYKRKKRFGKSIANKAPAMLITMLKQKCQSRGLEGVKEVDTHVCASQYNHQTDTCIKKALENRWNIMPDGERIQRDLYSAFLLQHCRRDLPEYNRKELQKEFGEELYRVFDREALQRDYPQFVAYHHMTIQRLSELPHTIPSMGIRRIIS

SEQ ID NO: 2144 - protein, 495 aa, unidentified
  REGION 1..495: note = Description of Unknown: uncultivated organism sequence
  REGION 1..495: note = Category: MG81 effectors
  REGION 1..495: note = Description: MG81-422 effector
MPNTDSNRCILTLPLMTEPWQEHLIETRFDIMEHLKNSLIALELRKLKNLQRTRAYKELEKKIFEKPKEERKPLYKERSAMLRTAGFSEFDFINDMTPMQKHFADHIAAQISHRSASDVWRAFESYLFSSGREVHFQKRGTLDSVACKKAGNGMNYRNDTFEWSGGRTPNAKRLCIRVENPQTEYEKHMLEKEVKNMRIIRKWMKTRYKYYLQLTLVGDPYQKPRKIGEGRVGIDIGTRTIAIASETTVRLLELADRIDGNHKRKCELQRKMDASKRATNPDNFNSDGTIRRRSKGKKMTWHFSKHYLRMRDQVRELERKNADIRTYQHNCLANEVLTLGTDVFVEPMSYKGLQHRAKETKVDEKGRYLKKKRFGKSLANKAPSKFLMILENKLACKGKALNYVDINRFRASQFDHTNGTYRKKQLSERFATLSTGEHVQRDMYSAFLLMNSNDSLNAPDIERCGQTFERFKELHAIEVERIRQSPYRRIQSFGI

SEQ ID NO: 2145 - protein, 508 aa, unidentified
  REGION 1..508: note = Description of Unknown: uncultivated organism sequence
  REGION 1..508: note = Category: MG81 effectors
  REGION 1..508: note = Description: MG81-423 effector
MADKECCVLTLPLQTEIWQEHIIEKRFAIMEHLKNQLIAKELRRLKNLERTKEYRNLIDEINNTPKEKRKALFSKRRKLLKDSGFSEYDFKDDIAGKNSLMQKHFIEHIATQIAHKLASDVWRSFDKFLFGNGRFIHFSKRGSLRSVASQKNGNGMTYKNGYFIWSGGQSKNKIILKIKVTPPKNEYEKEMLSKKIKYLRIVKKWVKTRYKYYLQFALEGKPVKKDRIVNKGNVGIDIGTQTVAISSADSVKLLELADKIDKNHTKKKILQRKMDRSRRYTNPQNYNEDGTIKKPPKGQRFSWYKSKKYIQLAGKVRELERKNADIRKYQHTCLANWILSLGDTVYVEQMNFSGLQRRAKETKIDKNGKYAKKKRYGKSLANKAPSMFLTILESKLNQYGGQLNKINTYEFKASQYDHTDDTFTKHNRSERWHILSNGDKNQRDLYSAFLIMNSDISLEHCNREKCNETYSNFKVLQDKEIERLYSDIRKGNCKNISSFGFQRNAKAM

SEQ ID NO: 2146 - protein, 528 aa, unidentified
  REGION 1..528: note = Description of Unknown: uncultivated organism sequence
  REGION 1..528: note = Category: MG81 effectors
  REGION 1..528: note = Description: MG81-424 effector
MILLTKNNNNTDTCVLTLPLRVEKWQEDCLLKRFEAARRIYNSLLNFELKKLRQLERTVEYRQIQSVISSAYRSNTKDSPECKDAFKRREKLISANGISENGFKSDVKFFYKHFDGLIGSNVAVHCIAVQLWAAFDKYLSGSGKEIHFKRLGDISSLKGYSVKGKSGGCEIIFRGQYVEWTRKKKKLLLPLKIDPDNEYEREMLSRRVKYVRIIKKPGKNRLRWYAQLTLEGKPALKYSAETGKPIHSVGKGNVGIDIGPQTVAYASDKEVALLELADRVTNIEHQKKKLQRKLDRSRRATNPDNYKPDGTIKRGVKLTRNKSKRYLKLQSKLAYIQHRQAEIRKLQHTCLANHMLTLGDRFFVEKMNWPGLAHRAKETSISEKTGRYKRKKRFGKSLANKAPAMFISILKRKCETLGLPGVVEVDTYSLKASQYNHLSDTYEKKSLSERWNYMPISDGSDSSKTKRIQRDLYSAFLLQHTIPQPCSFDKEALRIDYPNFVTMHDAEIHRLESLPKTVTSMGVRRSHS

SEQ ID NO: 2147 - protein, 317 aa, unidentified
  REGION 1..317: note = Description of Unknown: uncultivated organism sequence
  REGION 1..317: note = Category: MG81 effectors
  REGION 1..317: note = Description: MG81-425 effector
MLSYRVKYVRLLRKPGKRKDRWYAQLSLEGKPVIKYNPKTGEVRHPIGKGAVGLDIGPQTLAYSAATGADLVELANQVQNVEQEKRRLQRKLDRSRRATNPGNYADDGTIRRGIALTHNKSKRYLRTQQELKYLQHQQAEIRKRQHTELANHLLSLGDCFYVEKMVWTSLTHRAKETEISEKTGKIKRKKRFGKSVANKAPATLIGILQRKSAALGIPGVIEVPTSVKASQYNHQSGTYTPKPLSQRWNNMPDGERIQRDLYSAFLLQHYDPQTNTFDANSLHQDYPQFVQYHHDAVLRLYAMPKTPSSMGIKRSLR

SEQ ID NO: 2148 - protein, 475 aa, unidentified
  REGION 1..475: note = Description of Unknown: uncultivated organism sequence
  REGION 1..475: note = Category: MG81 effectors
  REGION 1..475: note = Description: MG81-426 effector
MKMIDAASNQKEKWALEKKRKAFLEENGFSRNAFKADMEKYYKHFNDNIGANVALHGITAQVWIAFDKVFVDNYKQKGKVHFKKPGELCSVQGYSQKKSGGKEIMFREDRIIWNQQGNRDRKKVKREFLLKLSPDNPYEAEMLKRHVKFVRILRKDGKTKPHWYAQLVLEGKPAVKRDPASGAPKHPVGHGVVGIDIGTRTLAYSTDSEVNLLELADRVQNIEQEKRRLQRKMDRSRRAMNPGNYKPDGSIKQGVKLTWNNSKRYKRIQHQYAMIQHHQADIRKQQHNELANYLLTLGDCFFVENMSYCDLVHRANKTEISEKTGRYKRKKRFGKSIANKAPAMLITMLKQKCQSRGLKGVKEVDTHVRASQYNHQTDTCIEKALENRWNVMPDGERIQRDLYSAFLLQHCKQGLPEYNRKELKKEFGEELYRVFDREALQRDYPQFVAYHHMTIQRLSELPHTIPSMGIRRSIS

SEQ ID NO: 2149 - protein, 526 aa, unidentified
  REGION 1..526: note = Description of Unknown: uncultivated organism sequence
  REGION 1..526: note = Category: MG81 effectors
  REGION 1..526: note = Description: MG81-427 effector
MAKNNNNNTDTCVLTLPLRVEKWQEDCLLKRFEAARRIYNSLLNFELKKLRQLERTVEYRQIQSVISSAYRSNTKDSPECKDAFKRREKLISANGISEYGFKSDVKFFYKHFDGLIGSSVAVHCIAVQLWAAFDKYLRGSGKEIHFKRLGEISSLKGYSVKGKSGGLEIIFRGQYVEWTRKKKKLLLPLKIDPDNEYEREMLSRRVKYVRIIKKPGKNRLRWYAQLTLEGKPALKYSAETGKPIHSVGKGNVGIDIGPQTVAYASDKEVALLELADRVTNIEHQKKKLQRKLDRSRRATSPDNYKPDGTIKRGVKLTRNKSKRYLKLQSKLAYIQHRQAEIRKLQHTCLANHMLTLGDRFFVEKMNWPGLAHRAKETSISEKTGRYKRKKRFGKSLANKAPAMFISILKRKCETLGLLGVVEVDTFRLRASQYNHLSDTYEKKSLSERWNYMPISDGSDRSKTKRIQRDLYSAFLLQHTIPQSCSFDKEALRIDYPNFVTMHDAEIHRLESLPKTITSMGVRRSHS

SEQ ID NO: 2150 - protein, 386 aa, unidentified
  REGION 1..386: note = Description of Unknown: uncultivated organism sequence
  REGION 1..386: note = Category: MG81 effectors
  REGION 1..386: note = Description: MG81-428 effector
MALRRRSGPFKKEGKKVHFKKTGDIRSLRGYSVTGKSGGVEIIFRGSYIEWKGLNLPLKLSPDNAYETEMLSYRVKYVRILRKPGKTRDRWYAQLSLEGKPAIKRNPASGNPVHPVGQGAVGLDIGPQTLAYAAEKEANLVELADRVQNIEREKHLLQRKMDRSRRAANPDNYAENGTIRRGVKLTHNKSKRYLRLQRELCYLQHCQAETRKRQHTELANHLLSLGSCFYVEDMAWPSLTHRAKKTEISDKTGRIKRKKRFGKSIANKAPAALINILRTKCVSLGIPGVVEVPTSLKASQYNHQSKEYTPKPLSQRWNDMPDGSRIQRDLYSAFLLQHYDPQSGNFDQASLEADYPQFVQLHNQSIQRLLTVPKTPSSMGIRRSVS

SEQ ID NO: 2151 - protein, 542 aa, unidentified
  REGION 1..542: note = Description of Unknown: uncultivated organism sequence
  REGION 1..542: note = Category: MG81 effectors
  REGION 1..542: note = Description: MG81-429 effector
MATTDKKDKDKEKLRAYKFRLDPNQAQTIALYQAAGAARYTYNMLTAYNLEVNRLRDDYWKKRHDEGISDADIKKELNALTKEDKRYKQLKYGAFGTQYLTPEKKRHEQAEHRIENGEDPSVVWNQETERSANPWLHTANQRVLVSGLKNASDAWDNFWASRTGKRAGRLVGTPRFKKKGVSRDSFTVPAPEKMGAYGTAYLRGEPAYKQGRRKITDYRHVRLSYLGTIRTFNSTKPLVKAVAAGAKIRRYTVSRNADRWYVSFLVKFSEPIRRSATKRARAAGSVGVDLGVKYLASLSDSEAPQRFPNLKFVEGLPSLENPRWSEASSRRLHKLQRALARSQKGSNRRSRLVKQIARLHHMTALRRESNLHQLTKKLATEYTLVGFEDLNVSGMTASAKGTVENPGKNVAQKSGLNRVVLDAAFGVFRNQLEYKAVWYGSAFEKVDRYFASSQTCSECGRKAKTKLTLRDRVFDCAYCGNMMDRDLNAAVNICREAQRLFDEKLASEDGESLNGRGSRGALRGAETVEASRPPASHRRGSP

SEQ ID NO: 2152 - protein, 527 aa, unidentified
  REGION 1..527: note = Description of Unknown: uncultivated organism sequence
  REGION 1..527: note = Category: MG81 effectors
  REGION 1..527: note = Description: MG81-430 effector
MAKNNNNNDTDTCVLTLPLRVEKWQEDCLLKRFEAARRIYNSLLNFELKKLRQLERTVEYRQIQSVISSAYRSNTKDSPECKDAFKRREKLISANGISENGFKSDVKFFYKHFDGLIGSSVAVHCIAVQLWAAFDKYLSGSGKEIHFKRLGDISSLKGYSVKGKSGGREIIFRGQYIEWTRKKKKLLLPLKIDPDNEYEREMLSRRVKYVRIIKKPGKNRLRWYAQLTLEGKPALKYSAGTGKPIHSVGKGNVGIDIGPQTVAYASDKEVALLELADRVTNIEHQKKKLQRKLDRSRRATNPDNYKPDGTIKRGVKLTRNKSKRYLKLQSKLAYIQHRQAEIRKLQHTCLANHMLTLGDRFFVEKMNWPGLAHRAKETSISEKTGRYKRKKRFGKSLANKAPAMFISILKRKCETLGLPGVVEVDTFRLKASQYNHLSDTYEKKSLSERWNYMPISDGSDSSKTKRIQRDLYSAFLLQHTIPQPCSFDKEALRIDYPNFVTMHDAEIHRLESLPKTITSMGVRRSHS

SEQ ID NO: 2153 - protein, 527 aa, unidentified
  REGION 1..527: note = Description of Unknown: uncultivated organism sequence
  REGION 1..527: note = Category: MG81 effectors
  REGION 1..527: note = Description: MG81-431 effector
MKALAVYNHHIERRDSYEKSNTDTCCLTLPLKLEKWQEDRLAKRFEIARQIYNTMVHAELKKLRNIENSQPYRQIQKQIEALNWKNQNDKARLKSLYNDRNKLLNTIGFSEYGFKADIKYYYKHFNDNIGSSVAVHGIAPQVWAAFEKMLFHKEGKKVHYKKKDDIHSLHGYSVTGKSGGVEIIFRKTYIEWKGLKLPLKRSPDNAYETEMLGRRVKYVRLLRKPGKRKDCWYAQLSLEGKPAIKRDPESGKRRHSIGRGAVGLDIGPQTLAYSACGAADLVELADQVQNIEQMKRRLQRKLDRSRRATNPDNYADNGTIRRGVKLTHNKSNRYRRTQRELRYLQHCQAEIRKRQHIELANHLLALGDCFYVEDMAWPSLTHRAKETAISEKTGRIKRKKRFGKSVANKAPATLIGILEQKCNSLGLPGVVKVPTSLRASQYNHQSGEYTSKPLSQRWNNMPDGERIQRDLYSAFLLQHYDPKAGNFDSALLQQDYPQFVQYHHRAIQRLSTVPKTLSSMGIQRSLR

SEQ ID NO: 2154 - protein, 536 aa, unidentified
  REGION 1..536: note = Description of Unknown: uncultivated organism sequence
  REGION 1..536: note = Category: MG81 effectors
  REGION 1..536: note = Description: MG81-432 effector
MDNEEKEKDGATCCLTLPLKLEKWQSDHLEKRFEIARQLYNTLVHAELKRIHRIERMPEYREIERLIEATTDKKEKWALKNQKKQFLRKNGINRNTFTTDMKRLYKHFNDNIGSNVAQHGIVSQVLTAFEKVYIENQSGEVHFKKPGDLRSVQGYSQKKSGGVEIMFREGKIIWNQQGNNDRKGVAREFPLKLSPDNSYEAEMLKKHVKFVRILRKEGKTKSHWYAQLVLEGKPTVKRDPISGAPKHPVGHGVVGIDIGTRTLAYSTDSEVNLLELADRVQNIEQEKRRLQRKMDRSRRAMNPENYNSDGTFKRGVKLTRNKSKRYRRIQHQLAMIQHHQADIRKQQHNELANYLLTLGDCFFVENMSYCDLVHRANKTEISEKTGRYKRKKRFGKSIANKAPAMLITMLKQKCQSRGLEGVKEVDTHVRASQYNHQTDTCIEKALENRWNVMPDGERIQRDLYSAFLLQHCKQGLPEYDRKELKKEFGEELYRVFDREALQRDYPQFVAYHHMTIQRLSELPHTIPSMGIRRIIS

SEQ ID NO: 2155 - protein, 526 aa, unidentified
  REGION 1..526: note = Description of Unknown: uncultivated organism sequence
  REGION 1..526: note = Category: MG81 effectors
  REGION 1..526: note = Description: MG81-433 effector
MNNEEKEKDGATCCLTLPLKLEKWQSDRLEKRFEIGRQIYNTIVHAELKKLRKLERTQQYQEIEQKLENAKQEETKELWKKKRQLLDQNGLSENHFKADMKHYYPHFKDNIASSVAVHGIASQAWTAFEKVLLSKDGKMVHFKKKGELSSLRGYSQAGKSGGIEIIFRGSYVEWKGLKLPLKLSPDNDYETEMLSKRVKYVRILRKDGKTKTHWYAQLALEGKPAVKRDSISGAPKHPVGHGVVGIDIGTRTLAYSTDKEVNLLELADRVQNIEQEKRRLQRKMDRSRRAMNPGNYKPDGSIKQGVKLTWNNSKRYKRIQHQYAMIQHHQADIRKQQHNELANYLLTLGDCFFVENMSYCDLAHRANKTEISEKTGRYKRKKRFGKSIANKAPAMLITMLKQKCQSRGLEGVKEVDTHVCASQYNHQTDTCIKKALENRWNIMPDGERIQRDLYSAFLLQHCRRDLPEYNRKELQKEFGEELYRVFDREALQRDYPQFVAYHHMTIQRLSELPHTIPSMGIRRIIS

SEQ ID NO: 2156 - protein, 538 aa, unidentified
  REGION 1..538: note = Description of Unknown: uncultivated organism sequence
  REGION 1..538: note = Category: MG81 effectors
  REGION 1..538: note = Description: MG81-434 effector
MNNEEKEKDGATCCLTLPLKLEKWQSDHLEKRFEIARQLYNTLVHAELKKKCQVERMPEYQEIMKMIDAASNQKEKWALEKKRKAFLEENGFSRNAFKADMEKYYKHFNDNIGANVALHGITAQVWIAFDKVFVDNYKQKGKVHFKKPGELCSVQGYSQKKSGGKEIMFREDRIIWNQQGNRDRKKVKREFLLKLSPDNPYEAEMLKRHVKFVRILRKDGKTKPHWYAQLVLEGKPAVKRDPASGAPKHPIGHGVVGIDIGTRTLAYSTDKEVNLLELADRVQNIEQEKRRLQRKMDRSRRAMNPGNYKPDGSIKQGVKLTWNNSKRYKRIQHQYAMIQHHQADIRKQQHNELANYLLTLGDCFFVENMSYCDLAHRANKTEISEKTGRYKRKKRFGKSIANKAPAMLITMLKQKCQSRGLEGVKEVDTHVCASQYNHQTDTCIKKALENRWNIMPDGERIQRDLYSAFLLQHCRRDLPEYNRKELQKEFGEELYRVFDREALQRDYPQFVAYHHMTIQRLSELPHTIPSMGIRRIIS

SEQ ID NO: 2157 - protein, 548 aa, unidentified
  REGION 1..548: note = Description of Unknown: uncultivated organism sequence
  REGION 1..548: note = Category: MG81 effectors
  REGION 1..548: note = Description: MG81-435 effector
MEWKSTGRGGTLVDNEEKKEDGATCCLTLPLKLEKWQSDHLEKRFEIARQLYNTLVHAELKRIHRIERMPEYREIERQIEATTDKKEKWALKNQKKQFLRKNGINRNTFTTDMKRLYKHFNDNIGSNVAQHGIVSQVLTAFEKVYIENQSGEVHFKKPGDLRSVQGYSQKKSGGVEIMFREGKIIWNQQGNNDRKGVAREFPLKLSPDNSYEAEMLKKHVKFVRILRNEGKTKPHWYAQLVLEGKPAIKRDPASGAPKHPVGHGVVGIDIGTRTLAYSTDSEVNLLELADRVQNIEQEKRRLQRKMDRSRRAMNPENYNSDGTFKRGVKLTRNKSKRYRRIQHQLAMIQHHQADIRKQQHNELANYLLTLGDCFFVENMSYCDLVHRANKTEISEKTGRYKRKKRFGKSIANKAPAMLITMLKQKCQSRGLEGVKEVDTHVRASQYNHQTDTCIEKALENRWNVMPDGERIQRDLYSAFLLQHCKQGLPEYDRKELKKEFGEELYRVFDREALQRDYPQFVAYHHMTIQRLSELPHTIPSMGIRRIIS

SEQ ID NO: 2158 - protein, 341 aa, unidentified
  REGION 1..341: note = Description of Unknown: uncultivated organism sequence
  REGION 1..341: note = Category: MG81 effectors
  REGION 1..341: note = Description: MG81-436 effector
MLPLKIDPDNEYEREMLSRRVKYVRIIKKPGKNRLRWYAQLTLEGKPALKYSAETGKPIHSVGKGNVGIDIGPQTVAYASDKEVALLELADRVTNIEHQKKKLQRKLDRSRRATNPDNYKPDGTIKRGVKLTRNKSKRYLKLQSKLAYIQHRQAEIRKLQHTCLANHMLTLGDRFFVEKMNWPGLAHRAKETSISEKTGRYKRKKRFGKSLANKAPAMFISILKRKCETLGLPGVVEVDTYSLKASQYNHLSDTYEKKSLSERWNYMPISDGSDSSKTKRIQRDLYSAFLLQHTIPQPCSFDKEALRIDYPNFVTMHDAEIHRLESLPKTVTSMGVRRSHS

SEQ ID NO: 2159 - protein, 538 aa, unidentified
  REGION 1..538: note = Description of Unknown: uncultivated organism sequence
  REGION 1..538: note = Category: MG81 effectors
  REGION 1..538: note = Description: MG81-437 effector
MDNEEKKEDGATCCLTLPLKLEKWQSDHLEKRFEIARQLYNTLVHAELKKKCQVERMSEYQEIMKMIDAASNQKEKWALEKKRKAFLEENGFSRNAFKADMEKYYKHFNDNIGANVALHGITAQVWIAFDKVFVDNYKQKGKVHFKKPGELCSVQGYSQKKSGGKEIMFREDRIIWNQQGNRDRKKVKREFLLKLSPNNPYEAEMLKRHVKFVRILRKDGKTKPHWYAQLVLEGKPAVKRDPISSAPKHPVGHGVVGIDIGTRTLAYSTDKEVNLLELADRVQNIEQEKRRLQRKMDRSRRAMNPENYNSDGTFKRGVKLTRNKSKRYRRIQHQLAMIQHHQADIRKQQHNELANYLLTLGDCFFVENMSYCDLVHRANKTEISEKTGRYKRKKRFGKSIANKAPAMLITMLKQKCQSRGLEGVKEVDTHVRASQYNHQTDTCIEKALENRWNVMPDGERIQRDLYSAFLLQHCKQGLPEYNRKELKKEFGEELYRVFDREALQRDYPQFVAYHHMTIQRLSELPHTIPSMGIRRIIS

SEQ ID NO: 2160 - protein, 522 aa, unidentified
  REGION 1..522: note = Description of Unknown: uncultivated organism sequence
  REGION 1..522: note = Category: MG81 effectors
  REGION 1..522: note = Description: MG81-438 effector
MKRSSTDTCCLTLPLKLEKWQSDRLEKRFEIGRQIYNTIVHAELKKLRKLERMQQYQEIEQKLENAKQEETKELWKKKRQLLDQNGLSEDHFKADMKYYYPHFKDNIASNVAVHGIASQAWTAFEKVLFSKDGKMVHFKKKGELSSLRGYSRAGKSGGVEIIFRGSYVEWKGLKLPLKLSPDNDYETEMLSKRVKYVRILRKDGKTKTHWYAQLVLEGKPTVKRDPISGAPKHPVEHGVVGIDIGTRTLAYSTDSEVNLLELADRVQNIEQEKRRLQRKMDRSRRAMNPENYNSDGPFKRGVKLTRNKSKRYRRIQHQLAMIQHHQADIRKQQHNELANYLLTLGDCFFVENMSYCDLVHRANKTEISEKTGRYKRKKRFGKSIANKAPAMLITMLKQKCQSRGLKGVKEVDTHVRASQYNHQTDTCIEKALENRWNVMPDGERIQRDLYSAFLLQHCKQGLPEYNRKELKKEFGEELYRVFDREALQRDYPQFVAYHHMTIQRLSELPHTIPSMGIRRIIS

SEQ ID NO: 2161 - protein, 524 aa, unidentified
  REGION 1..524: note = Description of Unknown: uncultivated organism sequence
  REGION 1..524: note = Category: MG81 effectors
  REGION 1..524: note = Description: MG81-439 effector
MAKNNNTDTCVLTLPLRVEKWQEDCLLKRFEAARRIYNSLLNFELKKLRQLERTVEYRQIQSVISSAYRSNTKDSPECKDAFKRREKLISANGISEYGFKSDVKFFYKHFDGLIGSSVAVHCIAVQLWAAFDKYLRGSGKEIHFKRLGEISSLKGYSVKGKSGGLEIIFRGQYVEWTRKKKKLLLPLKIDPDNEYEREMLSRRVKYVRIIKKPGKNRLRWYAQLTLEGKPALKYSAETGKPIHSVGKGDVGIDIGPQTVAYASDKEVALLELADRVTNIEHQKKKLQRKLDRSRRATNPDNYKPDGTIKRGVKLTRNKSKRYLKLQSKLAYIQHRQAEIRKLQHTCLANHMLTLGDRFFVEKMNWPGLAHRAKETSISEKTGRYKRKKRFGKSLANKAPAMFISILKRKCETLGLPGVVEVDTFRLKASQYNHLSDTYEKKSLSERWNYMPISDGSDSSKTKRIQRDLYSAFLLQHTIPQPCSFDKEALREDYPNFVTMHDAEIHRLESLPKTITSMGVRRSHS

SEQ ID NO: 2162 - protein, 511 aa, unidentified
  REGION 1..511: note = Description of Unknown: uncultivated organism sequence
  REGION 1..511: note = Category: MG81 effectors
  REGION 1..511: note = Description: MG81-441 effector
MKKSNTDTCCLTLPLKLEKWQEDRLAKRFEIARQLYNTLVHAELKRLAQVKQTAEYRENERKIRTLDRNNPADRAELSELYQKQKTMLDAKFRKSYFKKHMENYYKHFRDNIGSSVAVHGIAPQVWAAFDKVLFKKGGKKVHYKKPGEVNSVQGYSRTGKSGGREIMFRGAYIEWKGLKLPLKLSPDNAYETDMLQRRVKLVRLVRRPGKRRDRWYAQLVLEGKPAIKADPVTGKAVHPIGSGPIGLDIGPQTLAYSAAGAAGLVELADRVQNIEQEKRRLQRKMDRSRRATNPDNYAEDGTIRRGVKLTHYKSKRYRRRQQELKYLQHRQAEIRKLQHIQLANHLLSLGDHFYVEKMEWSSLTHRAKETVISEKTGKPRSKRRFGKSIANKAPAMLIEILRQKCKSLGLSDVVEITPADIKASQYNHLTGKYVKKSLSRRWNDMQDGEHLQRDLYSAFLLQHYDSCSKTLDLDSLARDYPAFVQYHHREIERLHALPKTPSSMGIRRSIA

SEQ ID NO: 2163 - protein, 508 aa, unidentified
  REGION 1..508: note = Description of Unknown: uncultivated organism sequence
  REGION 1..508: note = Category: MG81 effectors
  REGION 1..508: note = Description: MG81-442 effector
MADKECCVLTLPLQTEIWQEHIIEKRFAIMEHLKNQLIAKELRRLKNLERTKEYRNLIDEINNTPKEKRKALFSKRRKLLKDNGFNRNKFKDDMAVMQKHFEEHIATQIAQEAASDVWRSFDKYLFNNGKYIHFTRKGSLSSINCQKINNGMKYIDGYFIWTCGICSGKRDRRIILKIKVTPPKNEYEKEMLSKKIKYLRIVKKWVKTRYKYYLQFALEGKPVKKDRIVNKCNVGIDIGTQTVAISSADSVKILELADKIDKNHTKKKILQRKMDRSRRYTNPQNYNEDGTIKKPPKGQRFSWYKSKKYIQLAGKVRELERKNADIRKYQHTCLANWILSLGDTVYVEQMNFSGLQRRAKETKIDKNGKYAKKKRYGKSLANKAPSMFLTILESKLNQYGGQLNKINTYEFKASQYDHTDDTFTKHNRSERWHILSNGDKNQRDLYSAFLIMNSDISLKHCNREKCNETYSNFKVLQDKEIERLYSDIRKGNCKNISSFGFQRNAKAM

SEQ ID NO: 2164 - protein, 578 aa, unidentified
  REGION 1..578: note = Description of Unknown: uncultivated organism sequence
  REGION 1..578: note = Category: MG81 effectors
  REGION 1..578: note = Description: MG81-443 effector
MAFGSKNSTPSFVLTLPMVIGLNEQDYLNKEFKKCGIIYNQLVNATTKMWHQLRKTRKYRELMAAIAKAAPDSDEQKALFKQREKMLKEYRFSEDAFHAMVVPYAKHYAINSHVAQSIATAVWTAWSSFFFDKGKGVHYKKLEYVSSISGKNNATGIMLRPANHTTSVINSAKTKAKNSIEKKYFAAYRKPDAKEGEEVVLPDEVKAQMEKEIAAATAKVKTSIGKGKLHITYGDYTFPVTLRNPDTQTGWYQQEALKCGVKYCRIIRKWVSTKWKYYAQIVLEGYPPIKCDNNGVAKHPVKQGRVGIDIGTQTIAFSGKDVCDLRVLAPAARAQAKSLVNEIASTLRAMDRSRRATNPKYYNPDGTIKRLKRQHGQKQKRKWKYSKRYYRLRAKLRNLYRKLADIRKMEHNILANELLANGNEFVVEDMNYKALQKRSKETKINPKTGRAYTKKRFGKSLSRCAPAMFISILGKKANRYGGSVIKVSTFETKASQFDHTDESYTKKKLSERMARLRSGDIVQRDLYSAFLLEHIDTESLQYNMETLNSVFPAFLEMHENTKRRLQAVGSSLPASIGF

SEQ ID NO: 2165 - protein, 508 aa, unidentified
  REGION 1..508: note = Description of Unknown: uncultivated organism sequence
  REGION 1..508: note = Category: MG81 effectors
  REGION 1..508: note = Description: MG81-444 effector
MADKECCVLTLPLQTEIWQEHIIEKRFAIMEHLKNQLIAKELRRLKNLERTKEYRNLIDEINNTPKEKRKALFSKRRKLLKDNGFNRNKFKDDMAVMQKHFEEHIATQIAQEAASDVWRSFDKYLFNNGKYIHFTRKGSLSSINCQKINNGMKYIDGYFIWTCGICSGKRDRRIILKIKVTPPKNEYEKEMLSKKIKYLRIVKKWVKTRYKYYLQFALEGKPVKKDRIVNKGNVGIDIGTQTVAISSADSVKILELADKIDKNHTKKKILQRKMDRSRRYTNPQNYNEDGTIKKPPKGQRFSWYKSKKYIQLAGKVRELERKNADIRKYQHTCLANWILSLGDTVYVEQMNFSGLQRRAKETKIDKNGKYAKKKRYGKSLANKAPSMFLTILESKLNQYGGQLNKINTYEFKASQYDHTDDTFTKHNRSERWHILSNGDKNQRDLYSAFLIMNSDISLKHCNREKCNETYSNFKVLQDKEIERLYSDIRKGNCKNISSFGFQRNAKAM

SEQ ID NO: 2166 - protein, 508 aa, unidentified
  REGION 1..508: note = Description of Unknown: uncultivated organism sequence
  REGION 1..508: note = Category: MG81 effectors
  REGION 1..508: note = Description: MG81-445 effector
MADKECCVLTLPLQTEIWQEHIIEKRFAIMEHLKNQLIAKELRRLKNLERTKEYRNLIDEINNTPKEKRKALFSKRRKLLKDNGFNRNKFKDDMAVMQKHFEEHIATQIAQEAASDVWRSFDKYLFNNGKYIHFTRKGSLSSINCQKINNGMKYIDGYFIWTCGICSGKRDRRIILKIKVTPPKNEYEKEMLSKKIKYLRIVKKWVKTRYKYYLQFALEGKPVKKDRIVNKGNVGIDIGTQTVAISSADSVKILELADKIDKNHTKKKILQRKMDRSRRYTNPQNYNEDGTIKKPPKGQRFSWYKSKKYIQLAGKVRELERKNADIRKYQHTCLANWILSLGDTVYVEQMNFSGLQRRAKETKIDKNGKYAKKKRYGKSLANKAPSMFLTILESKLNQYGGQLNKINTYEFKASQYDHTDDTFTKHNRSERWHILSNGDKNQRDLYLAFLIMNSDISLKHCNREKCNETYSNFKVLQDKEIERLYSDIRKGNCKNISSFGFQRNAKAM

SEQ ID NO: 2167 - protein, 508 aa, unidentified
  REGION 1..508: note = Description of Unknown: uncultivated organism sequence
  REGION 1..508: note = Category: MG81 effectors
  REGION 1..508: note = Description: MG81-446 effector
MADKECCVLTLPLQTEIWQEHIIEKRFAIMEHLKNQLIAKELRRLKNLERTKEYRNLIDEINNTPKEKRKALFSKRRKLLKDNGFNRNKFKDDMAVMQKHFEEHIATQIAQEAASDVWRSFDKYLFNNGKYIHFTRKGSLSSINCQKINNGMKYIDGYFIWTCGICSGKRDRRIILKIKVTPPKNEYEKEMLSKKIKYLRIVKKWVKTRYKYYLQFALEGKPVKKDRIVNKGNVGIDIGTQTVAISSADSVKILELADKIDKNHTKKKILQRKMDRSRRYTNPQNYNEDGTIKKPPKGQRFSWYKSKKYIQLAGKVRELERKNADIRKYQHTCLANWILSLGDTVYVEQMNFSGLQRRAKETKIDKNGKYAKKKRYGKSLANKAPSMFLTILGSKLNQYGGQLNKINTYEFKASQYDHTDDTFTKHNRSERWHILSNGDKNQRDLYSAFLIMNSDISLKHCNRKKCNETYSTFKVLQDKEIERLYSDIRKGNCKNISSFGFQRNAKAM

SEQ ID NO: 2168 - protein, 551 aa, unidentified
  REGION 1..551: note = Description of Unknown: uncultivated organism sequence
  REGION 1..551: note = Category: MG81 effectors
  REGION 1..551: note = Description: MG81-447 effector
MSNLLFLLENEEKMRYNGVEKQREGEGTRVKRSSTDTCCLTLPLKLEKWQSDRLEKRFEIGRQIYNTIVHAELKKLRKLERTQQYQEIEQKLENAKQEETKELWKKKRQLLDQNGLSENHFKADMKYYYPHFKDNIASSVAVHGIASQAWTAFEKVLLSKDGKMVHFKKKGELSSLRGYSQAGKSGGIEIIFRGSYVEWKGLKLPLQLSPNNEYETEMLSKRVKYVRILRKDGKTKTHWYAQLALEGKPAVKRDSISGAPKHPVGHGVVGIDIGTRTLAYSTDSEVNLLELADRVQNIEQEKRRLQRKMDRSRRAMNPENYNSDGTFKRGVKLTRNKSKRYRRIQHQLAMIQHHQADIRKQQHNELANYLLTLGDCFFVENMSYCDLVHRANKTEISEKTGRYKRKKRFGKSIANKAPAMLITMLKQKCQSRGLKGVKEVDTHVRASQYNHQTDTCIEKALENRWNVMPDGERIQRDLYSAFLLQHCKQGLSEYNRKELKKEFGEELYRVFDREALQRDYPQFVAYHHMTIQRLSELPHTIPSMGIRRIIS

SEQ ID NO: 2169 - protein, 512 aa, unidentified
  REGION 1..512: note = Description of Unknown: uncultivated organism sequence
  REGION 1..512: note = Category: MG81 effectors
  REGION 1..512: note = Description: MG81-448 effector
MKKSSTDTCCLTLPLKLEKWQEDRLAKRFEIARQLYNTLVHAELKRLAQVKQTAEYRENERKIRTLDWNNPAHRTELEKLYEERRKSLKKAGFTDNSFTTDMGKYYKHFRDNIGSSVAVHGIAPQVWAAFDKLLFKKGGKKVHCKRPGEVNSVQGYSRTGKSGGREIMFRGAYIEWKGLKLPLKLSPDNAYETDMLQRRVKLVRLVRRPGKRRDRWYAQLVLEGKPAIKADPVTGKAVHPIGSGPVGLDIGPQTLAYSAAGVAGLVELADRVQNIEQEKRCLQRKMDRSRRATNPDNYAEDGTIRRGVKLTHNKSKRYRRNQQELKYLQHHQAEIRKLQHIQLANHLLSLGDHFYVEKMEWSSLTRRAKKTVISEKTGKPRSKKRFGKSIANKAPAMLIEILRQKCKSLGLPNVVEINPADIKASQYNHLTGEYVKKSLSRRWNDMQDGEHLQRDLYSAFLLQHYDSMSKALDLDSLARDYPAFVQYHHREIERLHALPKTPASMGIRRSIA

SEQ ID NO: 2170 - protein, 511 aa, unidentified
  REGION 1..511: note = Description of Unknown: uncultivated organism sequence
  REGION 1..511: note = Category: MG81 effectors
  REGION 1..511: note = Description: MG81-449 effector
MGKSSTDTCCLTLPLKLEKWQEDRLAKRFEIARQIYNTMVRAELKKLDRVKQLPEYRKNQKEIQALDGKNSADRARLKELRANQNRILQKQGFTKYGFKSDSKDYYKHFIENIGSSVATHGIAPQVWNAFDKMLFQKDGKVVHFKRYGDVHSLKGGSVAHKSGGAEIMFRKTYIEWKGLKLPLKLSPNNAYEAEMLSYRVKYVRILRTRGKTKDRWYAQLSLEGKPAVKYDSSTGKPVHPVGRGAVGLDIGPQTLAYVAANEANLVELADQVQNIEQEKRRLQRKLDRSRRATNPDNYNENGTIRRGVKLTHNKSKRYCKLQKELSWIQHCQAETRKRQHIALANHLLSLGDCFYVEPMAWPSLTHRAKKTEVSEETGRIKRKKRFGKSVANKAPASLIGILKLKCISLGLTGVVEVPMLLRASQYNHQSKDYAKKSLSQRWNDMPDGNRIQRDLYSAFLLQHYNSQSESFDQETLERDYPQFVRLHNQTIQRLSALPKTPSSMGIRRSVS

SEQ ID NO: 2171 - protein, 496 aa, unidentified
  REGION 1..496: note = Description of Unknown: uncultivated organism sequence
  REGION 1..496: note = Category: MG81 effectors
  REGION 1..496: note = Description: MG81-450 effector
MSEKKLGNTVLTLPLYPEKWQIDIIEKRFRIMELLKNALIAKELRRLRNLQRTRVWRRLEDEIRSTDKTERKKLYARRTELLRTAGFSKYGFYEDMEPMQKRYIVHIGAQVAQRASSDVWQAFEKMLYGNGDMVHFHKAGSLYSIANKKSGNCMIFRNGCLEWNGGQSRDAVKLILPSKARLTDYERQMLEKPIKYYRVIRKWMKTRWKYYVQITLAGETVHKDRPVGAGRVGIDIGTRTIAVAAEKAVFLRELADGVDENHRRKCALQRKMDNSRRSTNPENYNPDGTVRRPGKGHRPHWVKSRRYLKMQAMVRNLERKNADIRKYQHICLANEIIRLGTDVYVEQMSYSGLQRRAKETTYDDKGRAKKKKRFGKSLANKAPASFLLILNQKLSYLEPTGLKHVDTKAFRASQLDHTDQSYHSKKLGERWTVLSDGTKVQRDMYSAFLLMNSNAEMNGVDLEQCNQTFEHFKYMHDRAIETIRNDGKRHPASFGV

SEQ ID NO: 2172 - protein, 511 aa, unidentified
  REGION 1..511: note = Description of Unknown: uncultivated organism sequence
  REGION 1..511: note = Category: MG81 effectors
  REGION 1..511: note = Description: MG81-451 effector
MKKSNTDTCCLTLPLKLEKWQEDRLAKRFEIARQIYNTMVHAELKKLRNIENSQPYRQIQKQIEALNWKNQNDKARLKSLYNDRNKLLNTIGFSEYGFKADIKYYYKHFNDNIGSSVAVHGIAPQVWAAFEKMLFHKEGKKVHYKKKDDIHSLHGYSVTGKSGGVEIIFRKTYIEWKGLKLPLKRSPDNAYETEMLGRRVKYVRLLRKPGKRKDCWYAQLSLKGKPAIKRDPESGKRRHSIGRGAVGLDIGPQTLAYSACGAADLVELADQVQNIEQMKRRLQRKLDRSRRATNPDNYADNGTIRRGVKLTHNKSNRYRRTQRELRYLQHCQAEIRKRQHIELANHLLALGDCFYVEDMAWPSLTHRAKETAISEKTGRIKRKKRFGKSVANKAPATLIGILEQKCNSLGLPGVVKVPTSLRASQYNHQSGEYTSKPLSQRWNNMPDGERIQRDLYSAFLLQHYDPKAGNFDSVLLQQDYPQFVQYHHRAIQRLSTVPKTLSSMGIQRSLR

SEQ ID NO: 2173 - protein, 530 aa, unidentified
  REGION 1..530: note = Description of Unknown: uncultivated organism sequence
  REGION 1..530: note = Category: MG81 effectors
  REGION 1..530: note = Description: MG81-452 effector
MILLANNNNNNNTDTCVLTLPLRVEKWQEDCLLKRFEAARRIYNSLLNFELKKLRQLERTVEYRQIQSVISNAYRSNTKDSPECKAALKRREKLIDENGLTKNGFKNDVKFFYKHFDGLIGSSVAVHCIAVQLWAAFNKYLCGNGKEIHFKRLGDISSLKGYSVKGKSGGCEIIFRGQYVEWTRKKKKLLLPLKIDPDNEYEREMLSRRVKYVRIIKKPGKNRLRWYAQLTLEGKPALKYSAETGKPIHSVGKGDVGIDIGPQTVAYASDKEVALLELADRVTNIEHQKKKLQRKLDRSRRATNPDNYKPDGTIKRGVKLTRNKSKRYLKLQSKLAYIQHRQAEIRKLQHTCLANHMLTLGDRFFVEKMNWPGLAHRAKETSISEKTGRYKRKKRFGKSLANKAPAMFISILKQKCETLGLPGVVEVDTFRLKASQYNHLSDTCEKKSLSERWNYMPISDGSDSSKTKRIQRDLYSAFLLQHTIPQSCSFDKEALRIDYPNFVTMHDAEIHRLESLPKTITSMGVRRSHS

SEQ ID NO: 2174 - protein, 488 aa, unidentified
  REGION 1..488: note = Description of Unknown: uncultivated organism sequence
  REGION 1..488: note = Category: MG81 effectors
  REGION 1..488: note = Description: MG81-453 effector
MTNQEYNKLLKQYHKLSDRHILVAETDMPYSDVQKVVALSDKIRKAGNELVGLMRKNHDQLMRTKKYRKLLNLYGNTENKVHRKSLAKQLNEMQKAYNVTWDFCRTSMIPIGKKYGIDAVFALTKAEDVWRGMEKCLYGNGEMLHFSKYGELPCIRAKQINRGIPISIKDNKVQFKLGKIMFGLQIKDRFQTDEINSVMSYLANPEIMDTKAVDTFIEGARCIDTYRPCYATLVPKFIRGKYRVYLHLTIEGKAKPKYDKFGNPRHKYGKGIIGADIGTQTVAYTSDTEVGIKNLSERGNSIQDSERLERLYYRAMDRSRRATNPQNYNDNGTVKRGKKSWKYSNHYKKLRAKHSELCRINAVNRQLAINEDANHLRSLGDTIITEPKNASKLMLRVKKTTKNAKGKFNKKKRFGKSIKSRCPGGFQTTVKNKFKVSGGTYIEVPNNYRASQYDHTADEYIKKKLSDRLYKLRDGTLVQRDWYSSFLL

SEQ ID NO: 2175 - protein, 511 aa, unidentified
  REGION 1..511: note = Description of Unknown: uncultivated organism sequence
  REGION 1..511: note = Category: MG81 effectors
  REGION 1..511: note = Description: MG81-454 effector
MAKCSTDTCCLTLPLRLEKWQEDRLAKRFEIARQIYNTMVRAELKKLRAMEQSEPYKANQEKIQALDWKTQTDKQALKALYKERDKLLRDGGFSEYGFKSDIKNYYKHFNNNIGSNVAFHGIVPQVWAAFEKMLFKKEGKKVHFKKKGDIHSLRGYSAAGKSGGVEIIFRETYIEWKGLKLPLKLSPDNIYETQMLSYRVKYVRLLRKPGKRKDRWYAQLSLEGKPVIKYNPKTGEVRHPIGKGAVGLDIGPQTLAYSAATGADLVELANQVQNVEQEKRRLQRKLDRSRRATNPGNYADDGTIRRGIALTHNKSKRYLRTQQELKYLQHQQAEIRKRQHTELANHLLSLGDCFYVEKMVWTSLTHRAKETEISEKTGKIKRKKRFGKSVANKAPATLIGILQRKSAALGIPGVIEVPTSVKASQYNHQSGTYTPKPLSQRWNNMPDGERIQRDLYSAFLLQHYDPQTNTFDANSLHQDYPQFVQYHHDAVLRLYAMPKTPSSMGIKRSLR

SEQ ID NO: 2176 - protein, 338 aa, unidentified
  REGION 1..338: note = Description of Unknown: uncultivated organism sequence
  REGION 1..338: note = Category: MG81 effectors
  REGION 1..338: note = Description: MG81-455 effector
MGKSSTDTCCLTLPLKLEKWQEDRLAKRFEIARQIYNTMVRAELKRLRQVEQSPQYRSNKKAIQALDWKNTADKPKLKTLYRERDKLLKGGGFTEYGFKSDIKNFYKHFAENIGSSVAVHGIAPQVWAAFERVLFKKEGKKVHFKKTGDIRSLRGYSVTGKSGGVEIIFRGSYIEWKGLNLPLKLSPDNAYETEMLSYRVKYVRILRKPGKTRDRWYAQLSLEGKPAIKRNPASGNPVHPVGQGAVGLDIGPQTLAYAAEKEANLVELADRVQNIEREKHLLQRKMDRSRRAANPDNYAENGTIRRGVKLTHNKSKRYLRLQRELCYLQHCQAETRKR

SEQ ID NO: 2177 - protein, 511 aa, unidentified
  REGION 1..511: note = Description of Unknown: uncultivated organism sequence
  REGION 1..511: note = Category: MG81 effectors
  REGION 1..511: note = Description: MG81-456 effector
MAKCSTDTCCLTLPLRLEKWQEDRLAKRFEIARQIYNTMVRAELKKLRAMEQSEPYKANQEKIQALDRKTQTDKQALKALYKERDKLLRDGGFSEYGFKSDIKNYYKHFNNNIGSSVAVHGIAPQVWAAFEKMLFKKEGKKVHFKKKGDIHSLRGYSATGKSGGVEIIFRETYIEWKGLKLPLKLSPDNIYETQMLSYRVKYVRLLRKPGKRKDRWYAQLSLEGKPVIKYNPKTGEVRHPIGKGAVGLDIGPQTLAYSAATGADLVELANQVQNVEQEKRRLQRKLDRSRRATNPGNYADDGTIRRGIALTHNKSKRYLRTQQELKYLQHQQAEIRKRQHTELANHLLSLGDCFYVEKMVWTSLTHRAKETEISEKTGKIKRKKRFGKSVANKAPATLIGILQRKSAALGIPGVIEVPTSVKASQYNHQSGTYTPKPLSQRWNNMPDGERIQRDLYSAFLLQHYDPQTNTFDANSLHQDYPQFVQYHHDAVLRLYAMPKTPSSMGIKRSLR

SEQ ID NO: 2178 - protein, 519 aa, unidentified
  REGION 1..519: note = Description of Unknown: uncultivated organism sequence
  REGION 1..519: note = Category: MG81 effectors
  REGION 1..519: note = Description: MG81-457 effector
MPTKQKEGGNRCVLTLPLLTEPWQEHIIEKRFKIIEHLKNQLISIELRKLKNLQRTKAYKNLIKQIESVPKSERTALYKERNKMLEGKGFSRNVFQDDLGVMQNQFAEHINVQISHRAAWDVWSSFEKFLFGSGQMIHYQKRGTLKSIASKSPKNGMHYFPESNTFKWSGGRQKKIGQKGEQKKVSIKPISLCLRVSPLKTDYEKEMVANNEIKYYRVVRKWMKTKYKYYLQITFAGKPADKHREISTGRVGIDIGTQTIAIASDKSVKLLELADKVNKNHIKKCELQRKLDRSRRYTNPDNFNPDGTVKRGTKGHKLKWNKSKHYLEIAGKIRELERKNADIRKYQHTCLANDILAMGNQIYIEPMNYKGLQKRAKETQVDEKGRYKKKKRFGKSLANKAPAMFVTILKTKAEQHGGEVYEVDIMLYRASQCDHTTGEYTKHGLNDRWRILGNGDKVQRDLYSAFLIKNSNKTHDEIDLDKCSKTYDSFKKLHDKEIENIRNEVILRKRRNISSYGIA

SEQ ID NO: 2179 - protein, 511 aa, unidentified
  REGION 1..511: note = Description of Unknown: uncultivated organism sequence
  REGION 1..511: note = Category: MG81 effectors
  REGION 1..511: note = Description: MG81-458 effector
MAQRHSTPTCCLTLPLQLEKWQEDRLIKRFEIAGKIYNALLNAELKKLHRLEQLPEYKEIQSQLKAYYQNNLPKTAAFKELNNRRSKLLSEHGFSEYAFKGDMKKFYKHFSSNIGSSVATHCIASQVWSAFEKRLFGGGKFVHFKKSGDIRSLKGFSSSRKSGGVEIMFRGDHIEWKGLLLRLKLDPDNQYESEMLSRRIKYVRIIRKPGKAKWRWYAQLSVEGLPAIKRNDETGEPVHPIGRGAVGIDIGPQTIAYVSQTEVALKELADRVQNIEHEKRLIQRKLDRSRRATNPANYADNGTIKRGVKLTRNKSKRYLKLQMELSFLQHKQAEIRKQQHINLANHLLSLGDCFYVEDMAWSSLARKAKETAVSEKTGKYKRKKRFGKSIANKAPASLISILDQKCTSLGLLGVIKVPTSVRASQYNHITKSYEKKTLSQRWNIMPDGRRIQRDIYSAFLLQHVTPQRDGFSDEALQQDYENFVSLHDSVIQQLRLMPKTIASMGIRRTYS

SEQ ID NO: 2180 - protein, 1358 aa, unidentified
  REGION 1..1358: note = Description of Unknown: uncultivated organism sequence
  REGION 1..1358: note = Category: MG81 effectors
  REGION 1..1358: note = Description: MG81-459 effector
MKISKIKNSRPGISVAENKNEESLSRQSLLYYAPVKDGKIRLESKDLEQHVTECNEKAQKLYNVITPEINFYRDENRQKMVENLARNFNAVINNALRSIRNPKEKKEQRVEKEVAFILNLSKKSIKMKKDVFVKSTDLIVKFPENNKYNKKNDKGTGSKEAYIQKMISDLVLRKLKNTLRKEVKLENGYRMQMTEIIISLMSAICLYGNAESFDPAILKAFFEKVDSDYTKYKYVEQIVKSIESQSAKLKVVEKDGRHLLISANADHRKKKYVFEFMRMYAAADEKEKRELTEHIQDLIGLYLCGKAGYENAENRFSDMTESHNCICGKIEEILNELEKPENLSQKKKENLKNTTVKVMALKYRAAVNYLADEVGKTVLGEIREKKVRSCADLYWIEYIDSTVEKLLLKSRNKDGYRYEIGFLSKHIWKEWTQYISGKYIEMGKGVYHFAIPDLSGNLEGEPISICEVKPEYRNGVSGFDYERIRAEESLEREMEKYVLFAVNNFARAVTPEEEREKSGHEDVLLMKTLSEIEESQTKEERQKKHDNNVKNAITLYADADRRILQFFGGQSRFREKEDSLINLYSGEDLYKEIRKELYAIRNITFHYTTKADKDQTQKHDLAEYLFEEEFSDITELFREKYYANNVWKYYDVEVINTIMENIYCGRKYRAAQVPAFKNIISRPELPQVMNGFVKGNSLRRLMNCPDRDVINKYWSALFFVLKELYYYDFLQEQKKPEDNVKERFFRAIEKLSGQENDDKKQKAWESFGNRIDQIGRDRSFGAICQGLMIEYMLQNSDISMVQTETDNGKANNKKQIYKHYRTLLYNCIREAFIEYLREKWEGLRTPVLTVKEWSKEEFCRADGLKHLSLFDHLKKTFNDAESGSSWYMAAHFINQKYLNHLLGSIRNYLQFTEDIEDRAISLGDCVDNKREEKNLRYRNTLEILEFVAQFCERTTNVMEDYFESNQEYAEYLSGFVDYNTTKKETDIEKALYSFCKQKFKVDGKEYMAGIYYDGENLIPNRNIIRANMYGNTSCLKPCMDRITLKEIRTMYADQNKLDLVLKEGVCHTEEEQKAYREYQNEKNRIELFDVCTYTQILNDMQARLIGWSYMRERDLMYYQLGYYYTKLFWTDSISEEDARRRLVGNLVNVEDGAILYQILAFNSYNLPIIANKNNTVTLLKDEGSIGGKAITAFFKNYENAEMIYEEALDLFENMDEHAAIINTRNYIEHFKYFIKSDRSMMDLYSEIYDRFFRHDHNRKKNVPDSLKNVLADNFMIVDIDMELGSKKVGEKKKGFREHKAARIEFTDSGIRSTDMTYTIKPDIKDNKKDKKVLVPARSEVFLKQFRKILEYRIQDKIQ

SEQ ID NO: 2181 - protein, 511 aa, unidentified
  REGION 1..511: note = Description of Unknown: uncultivated organism sequence
  REGION 1..511: note = Category: MG81 effectors
  REGION 1..511: note = Description: MG81-460 effector
MGKSSTDTCCLTLPLKLEKWQEDRLAKRFEIARQIYNTMVRAELKKLDRVKQLPEYRKNQKEIQALDWKNSADKQRLKELYGNQRKILQKQGFTEYSFKADSKDYYKHFIENIGSSVATHGIAPQVWNAFDKMLFQKDGKVVHFKRYGDVHSLKGGSVAHKSGGAEIMFRKTYIEWKGLKLPLKLSPNNAYEAEMLSYRVKYVRILRTRGKTKDRWYAQLSLEGKPAVKYDSNTGKPVHPVGRGAVGLDIGPQTLAYAAANEANLVELADQVQNIEQEKRRLQRKLDRSRRATNPDNYNENGTIRRGVKLTHNKSKRYCKLQKELSWIQHCQAETRKRQHIALANHLLSLGDCFYVEPMAWPSLTHRAKKTEVSEKTGRIKRKKRFGKSVANKAPASLIGILKLKCISLGLTGVVEVPMLLKASQYNHQSKGYAPKSLSQRWNDMPDGNRIQRDLYSAFLLQHYNSQLENFNQETLERDYPQFVRLHNQTIQRLSALPKTPSSMGIRRSVS

SEQ ID NO: 2182 - protein, 512 aa, unidentified
  REGION 1..512: note = Description of Unknown: uncultivated organism sequence
  REGION 1..512: note = Category: MG81 effectors
  REGION 1..512: note = Description: MG81-461 effector
MGKSSTDTCCLSLPLKLEKWQEDRLAKRFEIARQIYNTLVHAELKRLSQVKRSQQYREIENKIRALDRNDQEDKKELSLLHKLRDDLLRKSGVNDYGFKADIKYFYKHFGENIGANVAVHGIAPQVWSAFDSVLFKKRGKKVHYKKPGDICSLRGYSVTGKSGGSEIMFRGTYIEWKGLKMPLKLSPDNIYESEMLDHRVKYVRIVRKPGKRKDRWYAQLSLECKPVIKCDPVSGEMRHPVGKGPVGLDIGPQTLAYCALSEAGLVELADQVQDIEREKQRLQRRLDRSRRAANPNNYAADGTIKRGVKLTHNKSKRYCILQRELRYLQQQQAETRKRQHTELANYLLSLGDRFYVEDMNWSSLARRAKKTEISEKTGRYKRKKRFGKSIANKAPGSLIDILKQKCESLGIPGVEKLPTSLLKASQYNHQTGEYTPKPRSQRWNDMPDGERIQRDLYSAFLLQHYDPVSKGYDQAALQRDYPQFLQHHHHSIQRLTAKPKTPSSMGIHQRLR

SEQ ID NO: 2183 - protein, 353 aa, unidentified
  REGION 1..353: note = Description of Unknown: uncultivated organism sequence
  REGION 1..353: note = Category: MG81 effectors
  REGION 1..353: note = Description: MG81-462 effector
MSGKSGGTEIIFHKTYIAWKGLTLPLKLSPDNAYEKEMLMRRIKYVRILRKPGKHKDRWYAQLSLEGNPVVKLDPVSGLPRHPIGKGAVGIDIGPQTLAYSAEGGADLVELADQVQCIEQEKSRLQRKMDRSRRASNPDNYAQDGTIKRGVKLTYNKSRRYCKLQKELAYMLYRQAETRKRQHRELINRLLTMGDCFYIEDMHWNSLAHRAKKTEISEKTGRYKRKKRFGKSIANKAPAMLVDMLEQKCKSLELDVVMVNTSLKASQYNHQTGKYEKKTLSQRWNYMPDGEQIQRDLYSAFLLQHVVPEKNAFDNEALCRDYPKFVQYHHEVIERLRSLPKTISSMGIRQSVS

SEQ ID NO: 2184 - protein, 529 aa, unidentified
  REGION 1..529: note = Description of Unknown: uncultivated organism sequence
  REGION 1..529: note = Category: MG81 effectors
  REGION 1..529: note = Description: MG81-463 effector
MAKNNNNNNNDTDTCVLTLPLRVEKWQEDCLLKRFEAARRIYNSLLNFELKKLRQLERTVEYRQIQSVISSAYRSNTKDSPECKDAFKRREKLISANGLAEYGFKSDVKFFYKHFDGLIGSNVAVHCIAVQLWAAFNKYLSGSGKEIHFKRLGEISSLKGYSVKGKSGGREIIFRGQYIEWTRKKKKLLLPLKIDPDNEYEREMLSRRVKYVRIIKKPGKNRLRWYAQLTLEGKPALKYSAETGKPIHSVGKGNVGIDIGPQTIAYASDKEVALLELADRVTNIEHQKKKLQRKLDRSRRATNPDNYKPDGTIKRGVKLTRNKSKRYLKLQSKLAYIQHRQAEIRKLQHTCLANHMLTLGDRFFVEKMNWSGLAHRAKETSISEKTGRYKRKKRFGKSLANKAPAMFISILKRKCKTLGLPGVVEVDTYSLKASQYNHLSDTYEKKSLSERWNYMPISDGSDSSKTKRIQRDLYSAFLLQHTIPQPCSFDKEALRIDYPNFVTMHDAEIHRLESLPKTVTSMGVRRSHS

SEQ ID NO: 2185 - protein, 525 aa, unidentified
  REGION 1..525: note = Description of Unknown: uncultivated organism sequence
  REGION 1..525: note = Category: MG81 effectors
  REGION 1..525: note = Description: MG81-464 effector
MANNNNNTDTCVLTLPLRVEKWQEDCLLKRFEAARRIYNSLLNFELKKLRQLERTVEYRQIQSVISSAYRSNTKDSPECKAALKRREKLIDANDLTEYGFKSDVKFFYKHFDGLIGSSVAVHCIAVQLWAAFNKYLCGNGKEIHFKRLGDISSLKGYSVKGKSGGCEIIFRGQYVEWTRKKKKLLLPLKIDPDNEYEREMLSRRVKYVRIIKKPGKNRLRWYAQLTLEGKPALKYSAETGKPIHSVGKGDVGIDIGPQTVAYASDKEVALLELADRVTNIEHQKKKLQRKLDRSRRATNPDNYKPDGTIKRGVKLTRNKSKRYLKLQSKLAYIQHRQAEIRKLQHTCLANHMLTLGDRFFVEKMNWPGLAHRAKETSISEKTGRYKRKKRFGKSLANKAPAMFISILKQKCETLGLPGVVEVDTFRLKASQYNHLSDTCEKKNLSERWNYMPISDGSDSSKTKRIQRDLYSAFLLQHTIPQSCSFDKEALRIDYPNFVTMHDAEIHRLESLPKTITSMGVRRSHS

SEQ ID NO: 2186 - protein, 534 aa, unidentified
  REGION 1..534: note = Description of Unknown: uncultivated organism sequence
  REGION 1..534: note = Category: MG81 effectors
  REGION 1..534: note = Description: MG81-465 effector
MGWKSKGRGGKRVKKSSTDTCCLTLPLKLEKWQSDRLEKRFEIGRQIYNTVVRAELKKLHQVERTPQYREIEQKLKEAKQEEAKELWKKRTQLLSKSGFSEYGFKSDMKYYYQHFKENIGSSVAVHGIASQVWTAFEKVLFSKDGKMVHFKKKGELSSLRGYSQAGKSGGIEIIFRGSYVEWKGLKLPLKLSSNNDYETEMLSKRVKYVRILRKEGKTKPHWYAQLVLEGKPAIKRDPASGAPKHPVGHGVVGIDIGTRTLAYSADSKVDLIELADRVQNIELEKMLLQRKLDRSRRATNPENYKPDGTIKKGVKLTRNKSKRYRKIQHQLAMLQHRQADIRKRQHNELANYLLTLGDCFFVEDMDYRALTRKAKKTEISEKTGRYKRKKRFGKSIANKAPSMLIALLDQKCKSLNLEGVKKVDTAVKASQYNHQTDECKAKELKERWNIMPDGERIQRDLYSAFLLQHCKRGLPEYNRKKLQEAFGNELYRVFDREALQRDYPKFVEYHRETIQRLSALPKTIPSMGIRRIIS

SEQ ID NO: 2187 - protein, 512 aa, unidentified
  REGION 1..512: note = Description of Unknown: uncultivated organism sequence
  REGION 1..512: note = Category: MG81 effectors
  REGION 1..512: note = Description: MG81-466 effector
MKKCTTDTCCLTLPLKLEKWQEDRLAKRFEIARQIYNTLVRAEFKKLNELERTPEYKKILEQIHSLDWKDSGNRQRLNDLYRERNQILENAKFTEYGFKSDMKFYYKHFSDNIGSCVAVHGIAPQVWAAFEKYLFKPEGKKVHFKRFGDVHSLRGYSKAGESGGAEITFCGTHIRWKNLELPIKLSPDNAYETEMLSRRVKYVRILRKPGKSKDRWYVQLSLEGKPAIKYDRNAGEIKHPVAHGAVGLDIGPQTLAYSAETTADLVELADQVQNIEQEKRRLQRKMDRSRRSTNPGNYNTDGTIRRGVKLTRNKSKAYCKLQRQLAYLQHTQAETRKRQHTELANYLLSLGDCFYVEEMKWSSLAHRAKETAVSEKTGRFKQKKRFGKSIANKAPSTLIGILQQKCESLGLPGIIYVPLSAKASQYNHLTGEYTPKPLSQRWNTMPDAQRVQRDLYSAFLLQHFDSQAGTYNLQSLQRDYPQFLQYHDQSIRRLSEMPKTLSSMGIRKSIRA

SEQ ID NO: 2188 - protein, 538 aa, unidentified
  REGION 1..538: note = Description of Unknown: uncultivated organism sequence
  REGION 1..538: note = Category: MG81 effectors
  REGION 1..538: note = Description: MG81-467 effector
MDNEEKEKDGATCCLTLPLKLEKWQSDHLEKRFEIARQLYNTLVHAELKKKCQVVRMPEYQEIMKMIDAASNQKEKWALEKKRKAFLEENGFSRNAFKADMEKYYKHFNDNIGANVALHGITAQVWIAFDKVFVDNYKQKGKVHFKKPGELCSVQGYSQKKSGGKEIMFREDRIIWNQQGNRDRKKVKREFLLKLSPDNPYEAEMLKRHVKFVRILRKDGKTKPHWYAQLVLEGKPAVKRDPASGAPKHPIGHGVVGIDIGTRTLAYSTDSEVNLLELADRVQNIEQEKRRLQRKMDRSRRAMNPGNYKPDGSIKQGVKLTWNNSKRYKRIQHQYAMIQHHQADIRKQQHNELANYLLTLGDCFFVENMSYCDLAHRANKTEISEKTGRYKRKKRFGKSIANKAPAMLITMLKQKCQSRGLEGVKEVDTHVCASQYNHQTDTCIKKALENRWNIMPDGERIQRDLYSAFLLQHCRRDLPEYNRKELQKEFGEELYRVFDREALQRDYPQFVAYHHMTIQRLSELPHTIPSMGIRRIIS

SEQ ID NO: 2189 - protein, 505 aa, unidentified
  REGION 1..505: note = Description of Unknown: uncultivated organism sequence
  REGION 1..505: note = Category: MG81 effectors
  REGION 1..505: note = Description: MG81-468 effector
MAKATTETCCLTLPLKLEKWQADRLDKRLEIARQIYNTLLRFELKKLRILINSEEYKDIENKRSETTDTNEKKKLNKKLDDLRKKAGFTEYSFKTDIKDFYKHFKDNIGSSVAVHGIAPQVWQAFDRLLYGNGREVHFKKRGSINSLRGYSVAGKSGGVEIMFRGDHIEWKGLHLPIKLDPNNVYECEMLQKRIKYCRIVKKQGRSKDHWYVQLMLEGKPAVKCDRHTGELLHPIGSGAVGIDIGPQTIAYVADKEVALKELADKVNNIEHKKQILQRKLDRSRRAANPDNYAPDGTIKRGVKLTHNKSKRYISTQRELADLMRKQAETRKRQHNELANHLLSLGDRFYVEDMQWPSLTHRAKKTEISEKTGRYKRKKRFGKSVGNKAPAMLISILDQKLRSRGKPGVTKVPTSVRASQYNHISDDYHKKELGERWNDMQDGRRIQRDLYSAFLLQHIDTDNNNFDKPTLFRDYENFVLLHDQYIEELKKLPKTLASMGIVRKAS

SEQ ID NO: 2190 - protein, 540 aa, unidentified
  REGION 1..540: note = Description of Unknown: uncultivated organism sequence
  REGION 1..540: note = Category: MG81 effectors
  REGION 1..540: note = Description: MG81-469 effector
MATTDKKDEENLRAYKFRLDPNQAQTTALYQAVGAARYTYNMLTAYNLEVNRLRDDYWKRRHDEGISDADIKKELNALAKEDKRYKQLNYGAFGTQYLTPEKKRHEQAEHRIENGEDPSVVWNQETERSANPWLHTANQRVLVSGLQNASDAWDNFWASRTGKRAGRLVGTPRFKKKGVSRDSFTVPAPEKMGAYGTAYLRGEPAYKQGRRKITDYRHVRLSYLGTIRTFNSTKPLVKAVAAGAKIRRYTVSRNADRWYVSFLVKFSEPIRRSATKRARAAGSVGVDLGVKYLASLSDSEAPQRFPNLKFVEGLPSLENPRWSEASSRRLHKLQRALARSQKGSNRRSRLVKQIARLHHMTALRRESNLHQLTKKLATEYTLVGFEDLNVSGMTASAKGTVENPGKNVAQKSGLNRVVLDAAFGVFRNQLEYKAVWYGSAFEKVDRYFASSQTCSECGRKAKTKLTLRDRVFDCAYCGNMMDRDLNAAVNICREAQRLFDEKLASEDRESLNGRGSRGALRGAETVEASRPPASHRRGSP

SEQ ID NO: 2191 - protein, 529 aa, unidentified
  REGION 1..529: note = Description of Unknown: uncultivated organism sequence
  REGION 1..529: note = Category: MG81 effectors
  REGION 1..529: note = Description: MG81-470 effector
MILLAKKNNNDTDTCVLTLPLRVEKWQEDCLLKRFEAARRIYNSLLNFELKKLRQLERTVEYRQIQSVISSAYRSNTKDSPECKAALKRREKLIDENGLTKNGFKNDVKFFYKHFDGLIGSSVAVHCIAVQLWAAFDKYLRGSGKEIHFKRLGDISSLKGYSVKGKSGGCEIIFRGQYVEWTRKKKKLLLPLKIDPDNEYEREMLSRRVKYVRIIKKPGKNRLRWYAQLTLEGKPALKYSAETGKPIHSVGKGDVGIDIGPQTVAYASDKEVALLELADRVTNIEHQKKKLQRKLDRSRRATNPDNYKPDGTIKRGVKLTRNKSKRYLKLQSKLAYIQHRQAEIRKLQHTCLANHMLTLGDRFFVEKMNWPGLAHRAKETSISEKTGRYKRKKRFGKSLANKAPAMFISILKQKCETLGLPGVVEVDTFRLKASQYNHLSDTCEKKSLSERWNYMPISDGSDSSKTKRIQRDLYSAFLLQHTIPQSCSFDKEALRIDYPNFVTMHDAEIHRLESLPKTITSMGVRRSHS

SEQ ID NO: 2192 - protein, 522 aa, unidentified
  REGION 1..522: note = Description of Unknown: uncultivated organism sequence
  REGION 1..522: note = Category: MG81 effectors
  REGION 1..522: note = Description: MG81-471 effector
MKRSSTDTCCLTLPLKLEKWQSDRLEKRFEIGRQIYNTIVHAELKKLRKLERTQQYQEIEQKLENAKQEETKELWKKKRQLLDQNGLSENHFKADMKHYYPHFKDNIASSVAVHGIASQAWTAFEKVLLSKDGKMVHFKKKGELSSLRGYSQAGKSGGIEIIFRGSYVEWKGLKLPLKLSPDNDYETEMLSKRVKYVRILRKDGKTKTHWYAQLALEGKPAVKRDSISGAPKHPVGHGVVGIDIGTRTLAYSTDKEVNLLELADRVQNIEQEKRRLQRKMDRSRRAMNPGNYKPDGSIKQGVKLTWNNSKRYKRIQHQYAMIQHHQADIRKQQHNELANYLLTLGDCFFVENMSYCDLAHRANKTEISEKTGRYKRKKRFGKSIANKAPAMLITMLKQKCQSRGLEGVKEVDTHVCASQYNHQTDTCIKKALENRWNIMPDGERIQRDLYSAFLLQHCRRDLPEYNRKELQKEFGEELYRVFDREALQRDYPQFVAYHHMTIQRLSELPHTIPSMGIRRIIS

SEQ ID NO: 2193 - protein, 473 aa, unidentified
  REGION 1..473: note = Description of Unknown: uncultivated organism sequence
  REGION 1..473: note = Category: MG81 effectors
  REGION 1..473: note = Description: MG81-472 effector
MVHAELKKLRNIENSQPYRQIQKQIEALDWKNQTDKARLKSLYNERNQLLKASGFTEYGFKADIKYYYKHFNDNIGSSVAVHGIAPQVWAAFEKMLFHKEGKKVHYKKKDDIHSLRGYSVTGKSGGVEIIFRETYIEWKGLKLPLKRSPDNAYETEMLSRRVKYVRLLRKPGKRKNRWYVQLSLEGKPAIKRDPESGELRHAIGRGAVGLDIGPQTLAYSACGAVDLVELADQVQNIEQMKRRLQRKLDRSRRATNPNNYADNGTIRRGVKLTHNKSNRYRRTQRELRYLQHCQAEIRKRQHIELANHLLALGDCFYVEDMAWPSLTHRAKETAISEKTGRIKRKKRFGKSVANKAPATLIGILEQKCNSLGLPGVMKVPTSLRASQYNHQSGEYTSKPLSQRWNDIPDGERIQRDLYSAFLLQHYDPQAGNFNSALLQQDYPQFVQYHHRAIQRLSTAPKTLSSMGIQRSLR

SEQ ID NO: 2194 - protein, 511 aa, unidentified
  REGION 1..511: note = Description of Unknown: uncultivated organism sequence
  REGION 1..511: note = Category: MG81 effectors
  REGION 1..511: note = Description: MG81-473 effector
MREDSQNTCCLTLPLKIEKWQADRLIKRFEIARQIYNTLVHAELKKLQKMEASAEYRQIQDRIRELNPSDAGAKKEWKILKDKQEKLWKAWKITEYGFKSDIKAYYKYFNENIGAAGATHDIAPRVWAAFEKKLNDRTGKVKIQYKKAGDIRSLKGFSVSGKSGGTEIIFHKTYIAWKGLTLPLKLSPDNAYEKEMLMRRIKYVRILRKPGKHKDRWYAQLSLEGNPVVKLDPVSRLPRQPIGKGAVGIDIGPQTLAYSAEGGADLVELADQVQCIEQEKSRLQRKMDRSRRASNPDNYAQDGTIKRGVKLTHNKSRRYCKLQKELAYMLYRQAETRKRQHRELINRLLTMGDCFYIEDMHWNSLAHRAKKTEISEKTGRYKRKKRFGKSIANKAPAMLVDMLEQKCKSLELDVVTVNTSLKASQYNHQTGKYEKKTLSQRWNRMPDGEQIQRDLYSAFLLQHVVPEKNAFDNEALCRDYPKFVQYHHEVIERLRSLPKTISSMGIRQSVS

SEQ ID NO: 2195 - protein, 523 aa, unidentified
  REGION 1..523: note = Description of Unknown: uncultivated organism sequence
  REGION 1..523: note = Category: MG81 effectors
  REGION 1..523: note = Description: MG81-474 effector
MPTKQKEDSNRCVLTLPLLTEPWQEHIIEKRFKIIEHLKNQLISIELRKLKNLQRTKAYKNLIKQIESVPKSERTVLYKERNKMLKDAGFSQYTFMDDMAGKKSLMQKHFESHINVQIAHKAAIDVWSSFEKFLFGSGQMIHYQKRGTLKSIASKSPKNGMHYFPESNTFKWSGGRQKKIGQKGEQKKVSIKPISLCLRVSPLKTDYEKEMVANNEIKYYRVVRKWMKTKYKYYLQITFAGKPADKHREISTGRVGIDIGTQTIAIASDKSVKLLELADKVNKNHIKKCELQRKLDRSRRYTNPDNFNPDGTVKRGTKGHKLKWIKSKHYLEIAGKIRELERKNADIRKYQHTCLANDILAMGNQIYIEPMNYKGLQKRAKETQVDEKGRYKKKKRFGKSLANKAPAMFVTILKTKAEQHGGEVYEVDIMSYRASQCDHTTGEYTKHGLNDRWRILGNGDKVQRDLYSAFLIKNSNKTHDEIDLDKCSKTYDNFKKLHDKEIENIRNEVKLRERKNISSYGIA

SEQ ID NO: 2196 - protein, 512 aa, unidentified
  REGION 1..512: note = Description of Unknown: uncultivated organism sequence
  REGION 1..512: note = Category: MG81 effectors
  REGION 1..512: note = Description: MG81-475 effector
MPTKQKEDSNRCVLTLPLLTEPWQEHIIEKRFKIIEHLKYQLISIELRKLKKLQRTKAYKNLIKQIESVPKSERTALYKERNKMLKDAGFSQYTFMDDMAGKKSLMQKHFESHINVQIAHKAAIDVWSSFEKFLFGTGQMIHYQKRGTLSSVASKSPKTGMFYYSDENIFKWSGGGTKPKGGIILCLRVASVKTNYEKEMVANNEIKYYRVVRKWMKTKYKYYLQITFAGKPADKHREISTGRVGIDIGTQTIAIASDKSVKLLELADKINKNHIKKCELQRKLDRSRRYTNPDNFNPDGTVKRGTKGHKLKWNKSKHYIEIAGKIRELERKNADIRKYQHTCLANDILAMGNQIYIEPMNYKGLQKRAKETQVDEKGRYKKKKRFGKSLANKAPAMFVTILKTKAEQHGGEVYEVDIMSYRASQCDHTTGEYTKHGLNDRWRILGNGDKVQRDLYSAFLIKNSNKTHDEIDLDKCSKTYDSFKKLHDKEIENIRNEVKLRERKNISSYGIA

SEQ ID NO: 2197 - protein, 522 aa, unidentified
  REGION 1..522: note = Description of Unknown: uncultivated organism sequence
  REGION 1..522: note = Category: MG81 effectors
  REGION 1..522: note = Description: MG81-476 effector
MKKSSTDTCCLTLPLKLEKWQSDRLEKRFEIGRQIYNTVVRAELKKLHQVERTPQYREIEQKLKEAKQEEAKELWKKRTQLLSKSGFSEYGFKSDMKYYYQHFKENIGSSVAVHGIASQVWTAFEKVLFSKDGKMVHFKKKGELSSLRGYSQAGKSGGIEIIFRGSYVEWKGLKLPLKLSSNNDYETEMLSKRVKYVRILRKEGKTKPHWYAQLVLEGKPAIKRDPASGAPKHPVGHGVVGIDIGTRTLAYSADSKVDLIELADRVQNIELEKMLLQRKLDRSRRATNPENYKPDGTIKKGVKLTRNKSKRYRKIQHQLAMLQHRQADIRKRQHNELANYLLTLGDCFFVEDMDYRALTRKAKKTEISEKTGRYKRKKRFGKSIANKAPSMLIALLDQKCKSLNLEGVKKVDTAVKASQYNHQTDECKAKELKERWNIMPDGERIQRDLYSAFLLQHCKRGLPEYNRKKLQEAFGNELYRVFDREALQRDYPKFVEYHRETIQRLSALPKTIPSMGIRRIIS

SEQ ID NO: 2198 - protein, 538 aa, unidentified
  REGION 1..538: note = Description of Unknown: uncultivated organism sequence
  REGION 1..538: note = Category: MG81 effectors
  REGION 1..538: note = Description: MG81-477 effector
MNNEEKEKEGATCCLTLPLKLEKWQSDHLEKRFEIARQLYNTLVHAELKKKCQVERMPEYQEIMKMIDAASNQKEKWALEKKRKAFLEENGFSRNAFKADMEKYYKHFNDNIGANVALHGITAQVWIAFDKVFVDNYKQKGKVHFKKPGELCSVQGYSQKKSGGKEIMFREDRIIWNQQGNRDRKKVKREFLLKLSPDNPYEAEMLKRHVKFVRILRKDGKTKPHWYAQLVLEGKPAVKRDPASGAPKHPIGHGVVGIDIGTRTLAYSTDSEVNLLELADRVQNIEQEKRRLQRKMDRSRRAMNPGNYKPDGSIKQGVKLTWNNSKRYKRIQHQYAMIQHHQADIRKQQHNELANYLLTLGDCFFVENMSYCDLAHRANKTEISEKTGRYKRKKRFGKSIANKAPAMLITMLKQKCQSRGLEGVKEVDTHVCASQYNHQTDTCIKKALENRWNIMPDGERIQRDLYSAFLLQHCRRDLPEYNRKELQKEFGEELYRVFDREALQRDYPQFVAYHHMTIQRLSELPHTIPSMGIRRIIS

SEQ ID NO: 2199 - protein, 528 aa, unidentified
  REGION 1..528: note = Description of Unknown: uncultivated organism sequence
  REGION 1..528: note = Category: MG81 effectors
  REGION 1..528: note = Description: MG81-478 effector
MAKKNNNNNDTDTCVLTLPLRVEKWQEDCLLKRFEAARRIYNSLLNFELKKLRQLERTVEYRQIQSVISSAYRSNTKDSLECKDAFKHREKLISANGISKNGFKSDVKFFYKHFDGLIGSSVAVHCIAVQLWAAFDKYLSGSGKEIHFKRLGDISSLKGYSVKGKSGGREIIFRGQYIEWTRKKKKLLLPLKIDPDNEYEREMLSRRVKYVRIIKKPGKNRLRWYAQLTLEGKPALKYSAGTGKPIHSVGKGDVGIDIGPQTVAYASDKEVALLELADRVTNIEHQKKKLQRKLDRSRRATNPDNYKPDGTIKRGVKLTRNKSKRYLKLQSKLAYIQHRQAEIRKLQHTCLANHMLTLGDRFFVEKMNWPGLAHRAKETSISEKTGRYKRKKRFGKSLANKAPAMFISILKRKCETLGLPGVVEVDTYSLKASQYNHLSDTYEKKSLSERWNYMPISDGSDSSKTKRIQRDLYSAFLLQHTIPQPCSFDKEALRIDYPNFVTMHDAEIHRLESLPKTVTSMGVRRSHS

SEQ ID NO: 2200 - protein, 1355 aa, unidentified
  REGION 1..1355: note = Description of Unknown: uncultivated organism sequence
  REGION 1..1355: note = Category: MG81 effectors
  REGION 1..1355: note = Description: MG81-479 effector
MKISKIKNSRPGISVAENKNEEPLSRQSLLYYAPVKDGKIRLESKDLEQHVTECNEKAQKLYNVITPEINFYRDENRQKMVENLAKNFNAVINNALRSIRNPKEKKEQRVEKEVAFILNLSKKSIKMKKDVFVKSTDLIVKFPENNKYNKKNDKGTGSKEADIQRIISDLVLRKLKKTLRKEVKLENGYRMQMTEITISLMSAICLYGNAESFDPAILKAFFEKVDSDYTKYKYVEQIVKSIESQSAKLKVIEKDGRHLLISANADHRKKKYVFEFMRMYAAADEKEKRELTEHIQDLIGLYLCGKAGYENAENRFSDMIESHNCICGKIEEILNELEKPENLSQQKKENLKNTTVKVMALKYRAAVNYLADEVGKTVLGEIREKKVRSCADLYWIEYIDSTVEKLLLKSRNKKRYRYEIGFLSKHIWKEWTQYISGKYIEIGKGVYHFAIPDLSGALEGESVSICEVKPEYRNGVSGFDYERIRAEESLEREMEKYVLFAVNNFARAVTPEEEREKSGHEDVLLMKTLSEIEESQTKEERQKKHDNNVKNAITLYADADRRILQFFGGQSRFREKEDSLINLYSGEDLYKEIRKELYAIRNITFHYTTKAEKDQTQKHDLAEYLFEEEFSDITELFREKYYANNVWKYYDAEVINTIMENIYCGRKYRAAQVPAFKNIISRPELPQVMNGFVKGNSLRRLMNCPDRDVINKYWSALFFVLKELYYYDFLQEQKKPEDNVKERFFRAIKKLSGQEKDDEKQKAWESFGNRIDQIGRDRSFGAICQGLMIEYMLQNSDISMVQTETDNGKANNKKQIYKHYRTLLYNCISEAFIEYLREKWKELRTPVLTAKEWSKEEFCRVDGLKHLSLFDHLKETFNDAESGSSWYMAAHFINQKYLNHLLGSIRNYLQFTEDIEDRAISLGDCVDNKREEKNLRYRNTLEILEFVAQFCERTTNVMEDYFESNQEYAEYLSDFVDYNTTKKETDIEKALYSFCKQKFKVDGKEYMAGIYYDGENLIPNRNIIRANMYGNTSCLKPCMDRITLKEIRTMYADQNKLDLVLKEGVCHTEEEQKAYREYQNEKNRIELFDVCTYTQILNDMQARLIGWSYMRERDLMYYQLGYYYTKLFWTDSISEEDARRRLVGNLVNVEDGAILYQILAFNSYNLPIIANKNNTVTLLKDEGSIGGKAITAFLKNYENAEMIYKEALDLFENMDEHAAIINTRNYIEHFKYFIKSDRSMMDLYSEIYDRFFRHDHNRKKNVPDSLKNVLADNFMIVDIDMELGSKKVGEKKKGFREHKAARIEFTDSGIRSTDMTYTIKPDIKDNKKVLVPARSEVFLKQFRKILEYRIQDKTQ

SEQ ID NO: 2201 - protein, 528 aa, unidentified
  REGION 1..528: note = Description of Unknown: uncultivated organism sequence
  REGION 1..528: note = Category: MG81 effectors
  REGION 1..528: note = Description: MG81-480 effector
MILLAKNNNNTDTCVLTLPLRVEKWQEDCLLKRFEAARRIYNSLLNFELKKLRQLERTVEYRQIQSVISSAYRSNTKDSPECKDAFKRREKLISANGISEYGFKSDVKFFYKHFDGLIGSNVAVHCIAVQLWAAFDKYLRGSGKEIHFKRLGDISSLKGYSVKGKSGGCEIIFRGQYVEWTRKKKKLLLPLKIDPDNEYEREMLSRRVKYVRIIKKPGKNRLRWYAQLTLEGKPALKYSAETGKPIHSVGKGNVGIDIGPQTVAYASDKEVALLELADRVTNIEHQKKKLQRKLDRSRRATNPDNYKPDGTIKRGVKLTRNKSKRYLKLQSKLAYIQHRQAEIRKLQHTCLANHMLTLGDRFFVEKMNWPGLAHRAKETSISEKTGRYKRKKRFGKSLANKAPAMFISILKRKCETLGLPGVVEVDTYSLKASQYNHLSDTYEKKSLSERWNYMPISDGSDSSKTKRIQRDLYSAFLLQHTIPQPCSFDKKALRIDYPNFVTMHDAEIHRLESLPKTITSMGVRRSHS

SEQ ID NO: 2202 - protein, 529 aa, unidentified
  REGION 1..529: note = Description of Unknown: uncultivated organism sequence
  REGION 1..529: note = Category: MG81 effectors
  REGION 1..529: note = Description: MG81-481 effector
MILLANNNNNNTDTCVLTLPLRVEKWQEDCLLKRFEAARRIYNSLLNFELKKLRQLERTVEYRQIQSVISNAYRSNTKDSPECKAALKRREKLIDENGLTKNGFKNDVKFFYKHFDGLIGSSVAVHCIAVQLWAAFNKYLCGNGKEIHFKRLGDISSLKGYSVKGKSGGCEIIFRGQYVEWTRKKKKLLLPLKIDPDNEYEREMLSRRVKYVRIIKKPGKNRLRWYAQLTLEGKPALKYSAETGKPIHSVGKGDVGIDIGPQTVAYASDKEVALLELADRVTNIEHQKKKLQRKLDRSRRATNPDNYKPDGTIKRGVKLTRNKSKRYLKLQSKLAYIQHRQAEIRKLQHTCLANHMLTLGDRFFVEKMNWPGLAHRAKETSISEKTGRYKRKKRFGKSLANKAPAMFISILKQKCETLGLPGVVEVDTFRLKASQYNHLSDTCEKKSLSERWNYMPISDGSDSSKTKRIQRDLYSAFLLQHTIPQSCSFDKEALRIDYPNFVTMHDAEIHRLESLPKTITSMGVRRSHS

SEQ ID NO: 2203 - protein, 318 aa, unidentified
  REGION 1..318: note = Description of Unknown: uncultivated organism sequence
  REGION 1..318: note = Category: MG81 effectors
  REGION 1..318: note = Description: MG81-482 effector
MLSKKIKYLRIVKKWVKTRYKYYLQFALEGKPVKKDRIVNKGNVGIDIGTQTVAISSADSVKILELADKIDKNHTKKKILQRKMDRSRRYTNPQNYNEDGTIKKPPKGQRFSWYKSKKYIQLAGKVRELERKNADIRKYQHTCLANWILSLGDTVYVEQMNFSGLQRRAKETKIDKNGKYAKKKRYGKSLANKAPSMFLTILGSKLNQYGGQLNKINTYEFKASQYDHTDDTFTKHNRSERWHILSNGDKNQRDLYSAFLIMNSDISLKHCNRKKCNETYSNFKVLQDKEIERLYSDIRKGNCKNISSFGFQRNAKAM

SEQ ID NO: 2204 - protein, 535 aa, unidentified
  REGION 1..535: note = Description of Unknown: uncultivated organism sequence
  REGION 1..535: note = Category: MG81 effectors
  REGION 1..535: note = Description: MG81-483 effector
MILLANNNNNNNNNNNNTDTCVLTLPLRVEKWQEDCLLKRFEAARRIYNSLLNFELKKLRQLERTVEYRQIQSVISSAYRSNTKDSPECKDAFKRREKLISANGISEYGFKSDVKFFYKHFDGLIGSNVAVHCIAVQLWAAFDKYLRGSGKEIHFKRLGDISSLKGYSVKGKSGGCEIIFRGQYIEWTRKKKKLLLPLKIDPDNEYEREMLSRRVKYVRIIKKPGKNRLRWYAQLTLEGKPALKYSAETGKPIHSVGKGNVGIDIGPQTVAYASDKEVALLELADRVTNIEHQKKKLQRKLDRSRRATNPDNYKPDGTIKRGVKLTRNKSKRYLKLQSKLAYIQHRQAEIRKLQHTCLANHMLTLGDRFFVEKMNWPGLAHRAKETSISEKTGRYKRKKRFGKSLANKAPAMFISILKRKCETLGLPGVVEVDTYSLKASQYNHLSDTYEKKSLSERWNYMPISDGSDSSKTKRIQRDLYSAFLLQHTIPQPCSFDKKALRIDYPNFVTMHDAEIHRLESLPKTITSMGVRRSHS

SEQ ID NO: 2205 - protein, 508 aa, unidentified
  REGION 1..508: note = Description of Unknown: uncultivated organism sequence
  REGION 1..508: note = Category: MG81 effectors
  REGION 1..508: note = Description: MG81-484 effector
MADKECCVLTLPLQTEIWQEHIIEKRFAIMEHLKNQLIAKELRRLKNLERTKEYRNLIDEINNTPKEKRKALFSKRRKLLKDSGFSEYDFKDDIAGKNSLMQKHFIEHIATQIAHKLASDVWRSFDKFLFGNGRFIHFSKRGSLRSVASQKNGNGMTYKNGYFIWNGGQSKNKIILKIKVTPPKNEYEKEMLSKKIKYLRIVKKWVKTRYKYYLQFALEGKPVKKDRIVNKGNVGIDIGTQTVAISSANSVKILELADKIDKNHTKKKILQRKMDRSRRYTNPQNYNEDGTIKKPPKGQRFSWYKSKKYIQLAGKVRELERKNADIRKYQHTCLANWILSLGDTVYVEQMNFSGLQRRAKETKIDKNGKYAKKKRYGKSLANKAPSMFLTILESKLNQYGGQLNKINTYEFKASQYDHTDDTFTKHNRSERWHILSNGDKNQRDLYSAFLIMNSDISLKHCNREKCNETYSNFKVLQDKEIERLYSDIRKGNCKNISSFGFQRNAKAM

SEQ ID NO: 2206 - protein, 496 aa, unidentified
  REGION 1..496: note = Description of Unknown: uncultivated organism sequence
  REGION 1..496: note = Category: MG81 effectors
  REGION 1..496: note = Description: MG81-485 effector
MAKNEQNCCVLTLPLLTEPWQEHIIETRFRIMEQLKNALIAKELGKLNNLKRTREWKRLMKSIQDAKDEKEKKQLFKKRTELLRNVGFSDFSFSNDVTNLKIHKHFAEHINSGIAQRAGKDVWRAFEKYLFSNGKTVHFHRRGTLDSVANRYAREGMMIDGDILTWKGGQSDHQIVLKIRIRRLKNAYEREMLQKTVRNLRIVRKWMKTRYKYYLQITLQGDPASKYRSVGKGRIGIDIGTQTIAWSSPTEVRLAELAAGIKRNHAEKTALQRKMDRSRRTANPQNYNPDGTIRRGVKLRWVKTKHYLRMEGRVRELERKNADIRQYEHICMANHILSLGNEVYIEDMSFKGLQGRAKETKLDKNGRFARKKRFGKSLANRAPSMFVTILENKLKASGGSLHKVNTRTFRASQYDHTADEFKKKTLGQRWNHLKNGDKIQRDLYSAFLLMNAAPSLEEPDKKLCGKTYPQFNRLHDAEMERLRAEEKPHLSSMGIH

SEQ ID NO: 2207 - protein, 527 aa, unidentified
  REGION 1..527: note = Description of Unknown: uncultivated organism sequence
  REGION 1..527: note = Category: MG81 effectors
  REGION 1..527: note = Description: MG81-486 effector
MAKNNNNNDTDTCVLTLPLRVEKWQEDCLLKRFEAARRIYNSLLNFELKKLRQLERTVEYRQIQSVISSAYRSNTKDSPECKDAFKRREKLISANGISENGFKSDVKFFYKHFDGLIGSSVAVHCIAVQLWAAFDKYLSGSGKEIHFKRLGDISSLKGYSVKGKSGGGEIIFRGQYVEWTRKKKKLLLPLKIDPDNEYEREMLSRRVKYVRIIKKPGKNRLRWYAQLTLEGKPALKYSAETGKPIHSVGKGNVGIDIGPQTVAYASDKEVALLELADRVTNIEHQKKKLQRKLDRSRRATNPDNYKPDGTIKRGVKLTRNKSKRYLKLQSKLAYIQHRQAEIRKLQHTCLANHMLTLGDCFFVEKMNWPGLAHRAKETSISEKTGRYKRKKRFGKSLANKAPAMFISILKRKCETLGLPGVVEVDTFRLRASQYNHLSDTYEKKSLSERWNYMPISDGSDSSKTKRIQRDLYSAFLLQHTIPQPCSFDKEALRIDYPNFVIMHDAEIHRLESLPKTITSMGVRRSHS

SEQ ID NO: 2208 - protein, 511 aa, unidentified
  REGION 1..511: note = Description of Unknown: uncultivated organism sequence
  REGION 1..511: note = Category: MG81 effectors
  REGION 1..511: note = Description: MG81-487 effector
MAARSKTDTCCLTLPLRLEKWQADRLAKRFHIAEQIYNAMLLSWIKKLRVVEQMPEYRAIQSQLQKLYEEDKQKTDAAKELFSRRKEILKKNGFPEYSFKTGIRKYYAHFKENIASNVATHCIASQVWDAFSKKLFGNGGRLHFKRAGDIHSLRGYSKSGESGGVEIIFRGTYIEWNGLRLPLKLDPQNPYEAEMLAKRVKYVRILRTPGKSIDHWYAQLALEGKPTVKRNAATGEPVHPSGRGAVGIDIGPRTIAYVSENEVGLRELADQVENIERDKRRLQRKLDRSRRATNPDNYAPDGTIKRGIKHTHNKSSRYRRMQKELSLLQHRQALIRKRQHTELANHLLSLGDCFYVEDMPWKGLARRTKETTVSPTTGRYRRKKRFGKSISNKAPGTLILILEQKCKSRGVSGVIRVPTNIKASQYNHMTDTYKPKPLSQRWNDMPDGKRIQRDLYSAFLLQHVTPELDGFERTKLIEDYDGFIHLHDKEIHELTLAPKTIASMGISRTRS

SEQ ID NO: 2209 - protein, 511 aa, unidentified
  REGION 1..511: note = Description of Unknown: uncultivated organism sequence
  REGION 1..511: note = Category: MG81 effectors
  REGION 1..511: note = Description: MG81-488 effector
MAKCSTDTCCLTLPLRLEKWQEDRLAKRFEIARQIYNTMVRAELKKLRAIEQSEPYKANQEKIQALDWKTQTDKQALKALYKERDKLLQDGGFSERGFKSDIKNYYKHFNNNIGSNVAVHGIAPQVWAAFEKMLFKKEGKKVHFKKKGDIRSLRGYSITRKSGGVEIIFRETYIEWKGLKLPLKLSPDNSYETQMLSYRVKYVRLLRKPGKRKDRWYAQLSLEGKPVIKYNPKTGEVRHPIGKGAVGLDIGPQTLAYSAATGADLVELANQVQNVEQEKRRLQRKLDRSRRATNPGNYADDGTIRRGIALTHNKSKRYLRTQQELKYLQHQQAEIRKRQHTELANHLLSLGDCFYVEKMVWTSLTHRAKETEISEKTGKIKRKKRFGKSVANKAPATLIGILQRKSAALGIPGVIEVPTSVKASQYNHQSGTYTPKPLSQRWNNMPDGERIQRDLYSAFLLQHYDPQTNTFDANSLHQDYPQFVQYHHDAVLRLYAMPKTPSSMGIKRSLR

SEQ ID NO: 2210 - protein, 511 aa, unidentified
  REGION 1..511: note = Description of Unknown: uncultivated organism sequence
  REGION 1..511: note = Category: MG81 effectors
  REGION 1..511: note = Description: MG81-489 effector
MARCTTPTCVLTLPSHLEKWQEDRLAKRFEIAQKIYNALLGAELKKLRRLEQTPKYRAIKKDLAALYGDKEKNADRIRALYKKRNKLLKDNSFTEYGFTVDAKLYYKPFRTNIGSCVAVHCIAPQVWSAFEKYLFGNGKRIHFKRPGEIYSLRGYSSKTSSGVEIIYRGDHIEWNKLRLPLKLDLGNQYEEEMLTNRVKYVRILRRPGKNRDHWYAQLTLEGLPAIKRDDETGDPVHSIGNGPVGIDIGPQTIAYSSSKEAGLLELADRVQNIENKKCRIQRKMDRSRRAANPGNYNPDGTIKRGVPLTRNKSKRYLRLQNELAWIQHQQAAIRKEQHVALANYLLTLGDCFYIEDMNWQGLARRAKETAIPEPEKERKCRRKKRFGKSIANKAPATLVTILKNKCTSLGLPGVIPISTKVRASQYNHLTDSYQKKELSQRWNEMPDGRKIQRDLYSAFLLQHMNSQLDGFDRASLLRDYESFVSLHDQAILRAAAVPKLISSMGIKRTAN

SEQ ID NO: 2211 - protein, 426 aa, unidentified
  REGION 1..426: note = Description of Unknown: uncultivated organism sequence
  REGION 1..426: note = Category: MG81 effectors
  REGION 1..426: note = Description: MG81-490 effector
MIHISAKYGVDSIFALSKAEDIWRAVEQCLYGDGRTLHFTKYGKLPGIRAKQINRGIRFTVKDNHLCFKLRKIAFGIKINDRFQHDEITAVLSYLNDPEAADRRAVDVFINDGSCIDTYRPCYATLVPKMIRGKYRVYLYLTIEGKAKLKYDRFGNHRHQYGTGMIGADIGIQTVAYTSDTEVGLKNLSERGNSIQHSERKERLLNRAMFRSRQATNPQNFNCNGSVKKGAKNWKYSKHYKKLKYKYSELCRINAINRRLAINEDANHLRSLGDIFVTEPQNVRKLMRRAKKTTRDKNGRFNKKKRFGKSIRCRCPAGFQRTVAKKFVNTGGTYIEVPYNYRASQYDHTADDYIKKKLSARMYKLQDGTKVQRDWYSSFLLYCYNPHTNAIDKTKCAAAFTTQYHKEKTLIEQIKKRKIKVLNSGI

SEQ ID NO: 2212 - protein, 540 aa, unidentified
  REGION 1..540: note = Description of Unknown: uncultivated organism sequence
  REGION 1..540: note = Category: MG81 effectors
  REGION 1..540: note = Description: MG81-491 effector
MATTDKKDEENLRAYKFRLDPNQAQTTALYQAVGAARYTYNMLTAYNLEVNRLRDDYWKRRHDEGISDADIKKELNALAKEDKRYKQLNYGAFGTQYLTPEKKRHEQAEHRIENGEDPSVVWNQETERSANPWLHTANQRVLVSGLQNASDAWDNFWASRTGKRAGRLVGTPRFKKKGISRDSFTVPAPEKMGAYGTAYLRGEPAYKQGRRKITDYRHVRLSYLGTIRTFNSTKPLVKAVAAGAKIRRYTVSRNADRWYVSFLVKFSEPIRRSATKRARAAGSVGVDLGVKYLASLSDSEAPQRFPNLKFVEGLPSLENPRWSEASSRRLHKLQRALARSQKGSNRRSRLVKQIARLHHMTALRRESNLHQLTKKLATEYTLVGFEDLNVSGMTASAKGTVENPGKNVAQKSGLNRVVLDAAFGVFRNQLEYKAVWYGSAFEKVDRYFASSQTCSECGRKAKTKLTLRDRVFDCAYCGNMMDRDLNAAVNICREAQRLFDEKLASEDRESLNGRGSRGALRGAETVEASRPPASHRRGSP

SEQ ID NO: 2213 - protein, 511 aa, unidentified
  REGION 1..511: note = Description of Unknown: uncultivated organism sequence
  REGION 1..511: note = Category: MG81 effectors
  REGION 1..511: note = Description: MG81-492 effector
MAKCSTDTCCLTLPLRLEKWQEDRLAKRFEIARQIYNTMVRAELKKLRAMEQSKPYKANQEKIQALDWKTQADKQALKALYKERDKLLRDGGFSEYGFKSDIKNYYKHFNNNIGSSVAVHGIAPQVWAAFEKMLFKKEGKKVHFKKKGDIHSLRGYSAAGKSGGVEIIFRETYIEWKGLKLPLKLSPDNIYETQMLSYRVKYVRLLRKPGKRKDRWYAQLSLEGKPVIKYNPKTGEVRHPIGKGAVGLDIGPQTLAYSAATGADLVELANQVQNVEQEKRRLQRKLDRSRRATNPGNYADDGTIRRGIALTHNKSKRYLRTQQELKYLQHQQAEIRKRQHTELANHLLSLGDCFYVEKMVWTSLTHRAKETEISEKTGKIKRKKRFGKSVANKAPATLIGILQRKSAALGIPGVIEVPTSVKASQYNHQSGTYTPKPLSQRWNNMPDGERIQRDLYSAFLLQHYDPQTNTFDANSLHQDYPQFVQYHHDAVLRLYAMPKTPSSMGIKRSLR

SEQ ID NO: 2214 - protein, 511 aa, unidentified
  REGION 1..511: note = Description of Unknown: uncultivated organism sequence
  REGION 1..511: note = Category: MG81 effectors
  REGION 1..511: note = Description: MG81-493 effector
MAKCSTDTCCLTLPLRLEKWQEDRLAKRFEIARQIYNTMVRAELKKLRAMEQSEPYKANQEKIQALDWKTQTDKQALKALYKERDKLLRDGGFSEYGFKSDIKNYYKHFNNNIGSNVAFHGIAPQVWAAFEKMLFKKEGQKVHFKKKGDIHSLRGYSAAGKSGGVEIIFRETYIEWKGLKLPLKLSPDNIYETQMLSYRVKYVRLLRKPGKRKDRWYAQLSLEGKPVIKYNPKTGEVRHPIGKGAVGLDIGPQTLAYSAATGADLVELANQVQNVEQEKRRLQRKLDRSRRATNPGNYADDGTIRRGIALTHNKSKRYLRTQQELKYLQHQQAEIRKRQHTELANHLLSLGDCFYVEKMVWTSLTHRAKETEISEKTGKIKRKKRFGKSVANKAPATLIGILQRKSAALGIPGVIEVPTSVKASQYNHQSGTYTPKPLSQRWNNMPDGERIQRDLYSAFLLQHYDPQTNTFDANSLHQDHPQFVQYHHDAVLRLYAMPKTPSSMGIKRSLR

SEQ ID NO: 2215 - protein, 511 aa, unidentified
  REGION 1..511: note = Description of Unknown: uncultivated organism sequence
  REGION 1..511: note = Category: MG81 effectors
  REGION 1..511: note = Description: MG81-494 effector
MREDSQNTCCLTLPLKIEKWQADRLIKRFEIARQIYNTLVHAELKKLQKMEASAEYRKIQDRIRELNPSDVRAKKEWKILKDKQEKLWKAWKITEYGFKSDIKAYYKYFNENIGSAVATHDIAPRVWAAFEKKLNDRTGKVKIQYKKAGDIRSLKGFSVSGKSGGTEIIFHKTYIAWKGLTLPLKLSPDNAYEKEMLMRRIKYVRILRKPGKHKDRWYAQLSLEGNPVVKLDPVSGLPRHPIGKGAVGIDIGPQTLAYSAEGGADLVELADQVQCIEQEKSRLQRKMDRSRRASNPDNYAQDGTIKRGVKLTHNKSRRYCKLQKELAYMLYRQAETRKRQHRELINRLLTMGDCFYIEDMHWNSLAHRAKKTEISEKTGRYKRKKRFGKSIANKAPAMLVDMLKQKCKSLELDVVMVNTSLKASQYNHQTGKYEKKTLSQRWNRMPDGEQIQRDLYSAFLLQHVVPEKNAFDNEALCRDYPKFVQYHHEVIERLRSLPKTISSMGIRRSVS

SEQ ID NO: 2216 - protein, 511 aa, unidentified
  REGION 1..511: note = Description of Unknown: uncultivated organism sequence
  REGION 1..511: note = Category: MG81 effectors
  REGION 1..511: note = Description: MG81-495 effector
MAKCSTDTCCLTLPLRLEKWQEDRLAKRFEIARQIYNTMVRAELKKLRAMEQSEPYKANQEKIQALDWKTQADKQTLKALYKERDKLLQDGGFSERGFKSDIKNYYKHFNNNIGSNVAVHGIAPQVWAAFEKMLFKKEGKKVHFKKKGDIRSLRGYSVTGRSGGVEIIFRETYIEWKGLKLPLKLSPDNIYETQMLSYRVKYVRLLRKPGKRKDRWHAQLSLEGKPVIKYNPKTGEVRHPIGKGAVGLDIGPQTLAYSAATGADLVELANQVQNVEQEKRRLQRKLDRSRRATNPGNYADDGTIRRGIALTHNQSKRYLRTQQELKYLQHQQAEIRKRQHTELANHLLSLGDCFYVEKMVWTSLTHRAKETEISEKTGKIKRKKRFGKSVANKAPATLIGILQRKSAALGIPGVIEVPTSVKASQYNHQSGTYTPKPLSQRWNNMPDGERIQRDLYSAFLLQHYDPQTNTFDANSLHQDYPQFVQYHHDAVLRLYAMPKTPSSMGIKKSLR

SEQ ID NO: 2217 - protein, 540 aa, unidentified
  REGION 1..540: note = Description of Unknown: uncultivated organism sequence
  REGION 1..540: note = Category: MG81 effectors
  REGION 1..540: note = Description: MG81-496 effector
MMYNTKYQAKRGDPVGEKNSNDTDTCVLTLPLRVEKWQEDCLLKRFEAARRIYNSLLNFELKKLRQLERTVEYRQIQSVISSAYLSNTKDSLECKNAFKRREKLISANGISENGFKSDVKFFYKHFDGLIGSSVAVHCIAVQLWAAFDKYLSGSGKEIHFKRLGDISSLKGYSVKGKSGGLEIIFRGQYVEWTRKKKKLLLPLKIDPDNEYEREMLSRRVKYVRIIKKPGKNRLRWYAQLTLEGKPALKYSAGTGKPIHSVGKGNVGIDIGPQTVAYASDKEVALLELADRVTNIEHQKKKLQRKLDRSRRATNPDNYKPDGTIKRGVKLTRNKSKRYLKLQSKLAYIQHRQAEIRKLQHTCLANHMLTLGDRFFVEKMNWPGLAHRAKETSISEKTGRYKRKKRFGKSLANKAPAMFISILKRKCETLGLPGVVEVDTYNLKASQYNHLSDTYEKKSLSERWNYMPISDGSDSSKTKRIQRDLYSAFLLQHTIPQPCSFDKEALRIDYPNFVTMHDAEIHRLESLPKTITSMGVRRSHS

SEQ ID NO: 2218 - protein, 529 aa, unidentified
  REGION 1..529: note = Description of Unknown: uncultivated organism sequence
  REGION 1..529: note = Category: MG81 effectors
  REGION 1..529: note = Description: MG81-497 effector
MILLAKKNNNDTDTCVLTLPLRVEKWQEDCLLKRFEAARRIYNSLLNFELKKLRQLERTVEYRQIQSVISSAYRSNTKDSPECKDAFKRRKKLTDENGISEYGFKSDVKFFYKHFDGLIGSSVAVHCIAVQLWAAFDKYLRGNGKEIHFKRLGDISSLKGYSVRGKSGGCEIIFRGQYVEWTRKKKKLLLPLKIDPDNEYEREMLSRRVKYVRIIKKPGKNRLRWYAQLTLEGKPALKYSAETGKPIHSVGKGDVGIDIGPQTVAYASDKEVALLELADRVTNIEHQKKKLQRKLDRSRRATNPDNYKPDGTIKRGVKLTRNKSKRYLKLQSKLAYIQHRQAEIRKLQHTCLANHMLTLGDRFFVEKMNWPGLAHRAKETSISEKTGRYKRKKRFGKSLANKAPAMFISILKRKCETLGLPGVVEVDTYNLKASQYNHLSDTYEKKSLSERWNYMPISDGSDSSKTKRIQRDLYSAFLLQHTIPQPCSFDKEALRIDYPNFVTMHDAEIHRLESLPKTVTSMGVRRSHS

SEQ ID NO: 2219 - protein, 528 aa, unidentified
  REGION 1..528: note = Description of Unknown: uncultivated organism sequence
  REGION 1..528: note = Category: MG81 effectors
  REGION 1..528: note = Description: MG81-498 effector
MAKNNNNNNNTDTCVLTLPLRVEKWQEDCLLKRFEAARRIYNSLLNFELKKLRQLERTVEYRQIQSVISSAYRSNTKDSPECKDAFKRREKLISANGISENGFKSDVKFFYKHFDGLIGSNVAVHCIAVQLWAAFDKYLSGSGKEIHFKRLGDISSLKGYSVKGKSGGGEIIFRGQYVEWTRKKKKLLLPLKIDPDNEYEREMLSRRVKYVRIIKKPGKNRLRWYAQLTLEGKPALKYSAETGKPIHSVGKGNVGIDIGPQTVAYASDKEVALLELADRVTNIEHQKKKLQRKLDRSRRATNPDNYKPDGTIKCGVKLTRNKSKRYLKLQSKLAYIQHRQAEIRKLQHTCLANHMLTLGDRFFVEKMNWPGLAHRAKETSISEKTGRYKRKKRFGKSLANKAPAMFISILKRKCETLGLPGVVEVDTFRLRASQYNHLSDTYEKKSLSERWNYMPISDGSDSSKTKRIQRDLYSAFLLQHTIPQPCSFDKEALRIDYPNFVIMHDAEIHRLESLPKTITSMGVRRSHS

SEQ ID NO: 2220 - protein, 511 aa, unidentified
  REGION 1..511: note = Description of Unknown: uncultivated organism sequence
  REGION 1..511: note = Category: MG81 effectors
  REGION 1..511: note = Description: MG81-499 effector
MAKCSTDTCCLTLPLRLEKWQEDRLAKRFEIARQIYNTMVRAELKKLRAMEQSEPYKANQEKIQALDWKTQTDKQALKALYKERDKLLRDGGFSEYGFKSDIKNYYKHFNNNIGSNVAFHGIAPQVWAAFEKMLFKKEGKKVHFKKKGDIHSLRGYSAAGKSSGVEIIFRETYIEWKGLKLPLKLSPDNIYETQMLSYRVKYVRLLRKPGKRKDRWYAQLSLEGKPVIKYNPKTGEVRHPIGKGAVGLDIGPQTLAYSAATGADLVELANQVQNVEQEKRRLQRKLDRSRRATNPGNYADDGTIRRGIALTHNKSKRYLRTQQELKYLQHQQAEIRKRQHTELANHLLSLGDCFYVEKMVWTSLTHRAKETEISEKTGKIKRKKRFGKSVANKAPATLIGILQRKSAALGIPGVIEVPTSVKASQYNHQSGTYTPKPLSQRWNNMPDGERIQRDLYSAFLLQHYDPQTNTFDANSLHQDYPQFVQYHHDAVLRLYAMPKTPSSMGIKRSLR

SEQ ID NO: 2221 - protein, 525 aa, unidentified
  REGION 1..525: note = Description of Unknown: uncultivated organism sequence
  REGION 1..525: note = Category: MG81 effectors
  REGION 1..525: note = Description: MG81-500 effector
MANNNNNTDTCVLTLPLRVEKWQEDCLLKRFEAARRIYNSLLNFELKKLRQLERTVEYRQIQSVISSAYRSNTKDSPECKAALKRREKLIDENGLTKNGFKNDVKFFYKHFDGLIGSSVAVHCIAVQLWAAFNKYLCGNGKEIHFKRLGDISSLKGYSVKGKSGGCEIIFRGQYVEWTRKKKKLLLPLKIDPDNEYEREMLSRRVKYVRIIKKPGKNRLRWYAQLTLEGKPALKYSAETGKPIHSVGKGDVGIDIGPQTVAYASDKEVALLELADRVTNIEHQKKKLQRKLDRSRRATNPDNYKPDGTIKRGVKLTRNKSKRYLKLQSKLAYIQHRQAEIRKLQHTCLANHMLTLGDRFFVEKMNWPGLAHRAKETSISEKTGRYKRKKRFGKSLANKAPAMFISILKQKCETLGLPGVVEVDTFRLKASQYNHLSDTCEKKSLSERWNYMPISDGSDSSKTKRIQRDLYSAFLLQHTIPQSCSFDKEALRIDYPNFVTMHDAEIHRLESLPKTVTSMGVRRSHS

SEQ ID NO: 2222 - protein, 511 aa, unidentified
  REGION 1..511: note = Description of Unknown: uncultivated organism sequence
  REGION 1..511: note = Category: MG81 effectors
  REGION 1..511: note = Description: MG81-501 effector
MREDSQNTCCLTLPLKIEKWQADRLIKRFEIARQIYNTLVHAELKKLQKMEASAEYRQIQDRIRELNPSDVRAKKEWKILKDKQEKLWKAWKITEYGFKSDIKAYYKYFNENIGSAVATHDIAPRVWAAFEKKLNDRTGKVKIQYKKAGDIRSLKGFSVSGKSGGTEIIFHKTYIAWKGLTLPLKLSPDNAYEKEMLMRRIKYVRILRKPGKHKDRWYAQLSLEGNPVVKLDPVSGLPRHPIGKGAVGIDIGPRTLAYSAEGGADLVELADQVQCIEQEKSRLQRKMDRSRRASNPDNYAQDGTIKRGVKLTHNKSRRYCKLQKELAYMLYRQAETRKRQHRELINRFLTMGDCFYIEDMHWNSLAHRAKKTEISEKTGRYKRKKRFGKSIANKAPAMLVDMLKQKCKSLELDVVMVNTSLKASQYNHQTGKYEKKTLSQRWNHMPDGEQIQRDLYSAFLLQHVVPEKNAFDNEALCRDYPKFVQYHHEVIERLRPLPKTISSMGIRRSVS

SEQ ID NO: 2223 - protein, 543 aa, unidentified
  REGION 1..543: note = Description of Unknown: uncultivated organism sequence
  REGION 1..543: note = Category: MG81 effectors
  REGION 1..543: note = Description: MG81-502 effector
MATTDKKDEENLRAYKFRLDPNQAQTTALYQAVGAARYTYNMLTAYNSEVNRLRDDYWKKRHDEGISDADIKKELKALAKEDKRYKQLKYGAFSTQYLTPERDRHKDAALRIKNGEDPSVVWNQETERSANPWLHTVNRRVLVSGLQNASDAWDNFWDSRMGKRAGRLVGTPRFKKKGVSRDSFTVPAAEKAEKMGAYGTAYLRGEPAYKQGRRKITDYRHVRLSYLGTIRTFNSTKPLVKAVAAGAEIRSYTVSRNADRWYVSFLVKFSEPIRRSVTKRARAAGAVGVDLGVKYLASLSDSEAPQRFPNLKFAEGLPSLENPRWSEASSRRLHKLQRALVRSQKGSNRRSRLVKQIARLHHMTALRRESNLHQLTKKLATGYTLVGFEDLNVSGMTASAKGTVENPGKNVAQKSGLNRVVLDAAFGVFRNQLEYKAVWYGSAFEKVNRYFASSQMCSECGRKVKTKLTLRDRVFDCVYCGNMMDRDFNAAVNICREAQRLFDEKLASEDGESLNGRGSRGALRGAKTVEASRPPASHRRGSP

SEQ ID NO: 2224 - protein, 511 aa, unidentified
  REGION 1..511: note = Description of Unknown: uncultivated organism sequence
  REGION 1..511: note = Category: MG81 effectors
  REGION 1..511: note = Description: MG81-503 effector
MAKCSTDTCCLKLPLRLEKWQEDRLAKRFEIARQIYNTMVRAELKKLRAMEQSEPYKANQEKIQALDWKTQADKQALKALYKERDKLLRDGGFSEYGFKSDIKNYYKHFNNNIGSSVAVHGIAPQVWAAFEKMLFKKEGKKVHFKKKGDIRSLRGYSATGKSGGVEIIFRETYIEWKGLKLPLKLSPDNIYETQMLSYRVKYVRLLRKPGKRKDRWYAQLSLEGKPVIKYNPKTGEVRHPIGKGAVGLDIGPQTLAYSAATGADLVELANQVQNVEQEKRRLQRKLDRSRRATNPGNYADDGTIRRGIALTHNKSKRYLRTQQELKYLQHQQAEIRKRQHTELANHLLSLGDCFYVEKMVWTSLTHRAKETEISEKTGKIKRKKRFGKSVANKAPATLIGILQRKSAALGIPGVIEVPTSVKASQYNHQSGTYTPKPLSQRWNNMPDGERVQRDLYSAFLLQHYDPQTNTFDANSLHQDYPQFVQYHHDAVLRLYAMPKTPSSMGIKKSLR

SEQ ID NO: 2225 - protein, 511 aa, unidentified
  REGION 1..511: note = Description of Unknown: uncultivated organism sequence
  REGION 1..511: note = Category: MG81 effectors
  REGION 1..511: note = Description: MG81-504 effector
MREDSQNTCCLTLPLKIEKWQADRLIKRFEIARQIYNTLVHAELKKLQKMEASAEYRKIQDRIRELNPSDVRAKKEWKILKDKQEKLWKAWKITEYGFKSDIKAYYKYFNENIGSAVATHDIAPRVWAAFEKKLNDRTGKVKIQYKKAGDIRSLKGFSVSGKSGGTEIIFHKTYIAWKGLTLPLKLSPDNAYEKEMLMRRIKYVRILRKPGKHKDRWYAQLSLEGNPVVKLDPVSGLPRHPIGKGAVGIDIGPQTLAYSAEGGADLVELADQVQCIEQEKSRLQRKMDRSRRASNPDNYAQDGTIKRGVKLTHNKSRRYCKLQKELAYMLYRQAETRKRQHRELINRLLTMGDCFYIEDMHWNSLAHRAKKTEISEKTGRYKRKKRFGKSIANKAPAMLVDMLKQKCKSLELDVVMVNTSLKASQYNHQTGKYEKKTLSQRWNHMPDGEQIQRDLYSAFLLQHVVPEKNAFDNEALCREYPKFVQYHHEVIERLRSLPKTISSMGIRRSVS

SEQ ID NO: 2226 - protein, 530 aa, unidentified
  REGION 1..530: note = Description of Unknown: uncultivated organism sequence
  REGION 1..530: note = Category: MG81 effectors
  REGION 1..530: note = Description: MG81-505 effector
MILLAKNNNNNNTDTCVLTLPLRVEKWQEDCLLKRFEAARRIYNSLLNFELKKLRQLERTVEYRQIQSVISSAYRSNTKDSPECKDAFKRREKLISANGISENGFKSDVKFFYKHFDGLIGSNVAVHCIAVQLWAAFDKYLSGSGKEIHFKRLGDISSLKGYSVKGKSGGCEIIFRGQYVEWTRKKKKLLLPLKIDPDNEYEREMLSRRVKYVRIIKKPGKNRLRWYAQLTLEGKPALKYSAETGKPIHSVGKGNVGIDIGPQTVAYASDKEVALLELADRVTNIEHQKKKLQRKLDRSRRATNPDNYKPDGTIKCGVKLTRNKSKRYLKLQSKLAYIQHRQAEIRKLQHTCLANHMLTLGDRFFVEKMNWPGLAHRAKETSISEKTGRYKRKKRFGKSLANKAPAMFISILKRKCETLGLPGVVEVDTFRLRASQYNHLSDTYEKKSLSERWNYMPISDGSDSSKTKRIQRDLYSAFLLQHTIPQPCSFDKEALRIDYPNFVIMHDAEIHRLESLPKTITSMGVRRSHS

SEQ ID NO: 2227 - protein, 498 aa, unidentified
  REGION 1..498: note = Description of Unknown: uncultivated organism sequence
  REGION 1..498: note = Category: MG81 effectors
  REGION 1..498: note = Description: MG81-506 effector
MKRFEAARRIYNSLLNFELKKLRQLERTVEYRQIQSVISSAYRSNTKDSPECKAALKRREKLIDENGLTKNGFKNDVKFFYKHFDGLIGSSVAVHCIAVQLWAAFNKYLCGNGKEIHFKRLGDISSLKGYSVKGKSGGCEIIFRGQYVEWTRKKKKLLLPLKIDPDNEYEREMLSRRVKYVRIIKKPGKNRLRWYAQLTLEGKPALKYSAETGKPIHSVGKGDVGIDIGPQTVAYASDKEVALLELADRVTNIEHQKKKLQRKLDRSRRATNPDNYKPDGTIKRGVKLTRNKSKRYLKLQSKLAYIQHRQAEIRKLQHTCLANHMLTLGDRFFVEKMNWPGLAHRAKETSISEKTGRYKRKKRFGKSLANKAPAMFISILKQKCETLGLPGVVEVDTFRLKASQYNHLSDTCEKKSLSERWNYMPISDGSDSSKTKRIQRDLYSAFLLQHTIPQSCSFDKEALRIDYPNFVTMHDAEIHRLESLPKTITSMGVRRSHS

SEQ ID NO: 2228 - protein, 511 aa, unidentified
  REGION 1..511: note = Description of Unknown: uncultivated organism sequence
  REGION 1..511: note = Category: MG81 effectors
  REGION 1..511: note = Description: MG81-507 effector
MAKCSTDTCCLTLPLRLEKWQEDRLAKRFEIARQIYNTMVRAELKKLRAMEQSEPYKANQEKIQALDRKTQTDKQALKALYKERDKLLRDGGFSEYGFKSDIKNYYKHFNNNIGSNVAFHGIAPQVWAAFEKMLFKKEGKKVHFKKKGDIHSLRGYSAAGKSGGVEIIFRETYIEWKGLKLPLKLSPDNIYETQMLSYRVKYVRLLRKPGKRKDRWYAQLSLEGKPVIKYNPKTGEVRHPIGKGAVGLDIGPQTLAYSAATGADLVELANQVQNVEQEKRRLQRKLDRSRRATNPGNYADDGTIRRGIALTHNKSKRYLRTQQELKYLQHQQAEIRKRQHTELANHLLSLGDCFYVEKMVWTSLTHRAKETEISEKTGKIKRKKRFGKSVANKAPATLIGILQRKSAALGIPGVIEVPTSVKASQYNHQSGTYTPKPLSQRWNNMPDGERIQRDLYSAFLLQHYDPQTNTFDANSLHQDYPQFVQYHHDAVLRLYAMPKAPSSMGIKRSLR

SEQ ID NO: 2229 - protein, 550 aa, unidentified
  REGION 1..550: note = Description of Unknown: uncultivated organism sequence
  REGION 1..550: note = Category: MG81 effectors
  REGION 1..550: note = Description: MG81-508 effector
MGWKSKGRGGTLVDNEEKKEDGATCCLTLPLKLEKWQSDHLEKRFEIARQLYNTLVHAELKKKCQVERMPEYQEIMKMIDAASNQKEKWALEKKRKAFLEENGFSRNAFKADMEKYYKHFNDNIGANVALHGITAQVWIAFDKVFVDNYKQKGKVHFKKPGELCSVQGYSQKKSGGKEIMFREDRIIWNQQGNRDRKKVKREFLLKLSPDNPYEAEMLKRHVKFVRILRKDGKTKPHWYAQLVLEGKPAVKRDPASGAPKHPIGHGVVGIDIGTRTLAYSTDSEVNLLELADRVQNIEQEKRRLQRKMDRSRRAMNPGNYKPDGSIKQGVKLTWNNSKRYKRIQHQYAMIQHHQADIRKQQHNELANYLLTLGDCFFVENMSYCDLAHRANKTEISEKTGRYKRKKRFGKSIANKAPAMLITMLKQKCQSRGLEGVKEVDTHVCASQYNHQTDTCIKKALENRWNIMPDGERIQRDLYSAFLLQHCRRDLPEYNRKELQKEFGEELYRVFDREALQRDYPQFVAYHHMTIQRLSELPHTIPSMGIRRIIS

SEQ ID NO: 2230 - protein, 526 aa, unidentified
  REGION 1..526: note = Description of Unknown: uncultivated organism sequence
  REGION 1..526: note = Category: MG81 effectors
  REGION 1..526: note = Description: MG81-509 effector
MAKNNNNDTDTCVLALPLRVEKWQEDCLLKRFEAARRIYNSLLNFELKKLRQLERTVEYRQIQSVISSAYRSNTKDSPECKDAFKRREKLISANGISEYGFKSDVKFFYKHFDGLIGSSVAVHCIAVQLWVAFDKYLSGSGKEIHFKRLGDISSLKGYSVKGKSGGLEIIFRGQYVEWTRKKKKLLLPLKIDPDNEYEREMLSRRVKYVRIIKKPGKNRLRWYAQLTLEGKPALKYSAETGKPIHSVGKGNVGIDIGPQTVAYASDKEVALLELADRVTNIEHQKKKLQRKLDRSRRATNPDNYKPDGTIKRGVKLTRNKSKRYLKLQSKLAYIQHRQAEIRKLQHTCLANHMLTLGDRFFVEKMNWPGLAHRAKETSISEKTGRYKRKKRFGKSLANKAPAMFISILKRKCETLGLPGVVEVDTYSLKASQYNHLSDTYEKKSLSERWNYMPISDGSDSSKTKRIQRDLYSAFLLQHTIPQPCSFDKKALRIDYPNFVTMHDAEIHRLESLPKTITSMGVRRSHS

SEQ ID NO: 2231 - protein, 529 aa, unidentified
  REGION 1..529: note = Description of Unknown: uncultivated organism sequence
  REGION 1..529: note = Category: MG81 effectors
  REGION 1..529: note = Description: MG81-510 effector
MILLAKNNNNNTDTCVLTLPLRVEKWQEDCLLKRFEAARRIYNSLLNFELKKLRQLERTVEYRQIQSVISSAYRSNTKDSPECKDAFKRREKLISANGISEYGFKSDVKFFYKHFDGLIGSSVAVHCIAVQLWAAFDKYLRGSGKEIHFKRLGEISSLKGYSVKGKSGGLEIIFRGQYVEWTRKKKKLLLPLKIDPDNEYEREMLSRRVKYVRIIKKPGKNRLRWYAQLTLEGKPALKYSAETGKPIHSVGKGNVGIDIGPQTVAYASDKEVALLELADRVTNIEHQKKKLQRKLDRSRRATNPDNYKPDGTIKRGVKLTRNKSKRYLKLQSKLAYIQHRQAEIRKLQHTCLANHMLTLGDRFFVEKMNWPGLAHRAKETSISEKTGRYKRKKRFGKSLANKAPAMFISILKQKCETLGLPGVVEVDTFRLKASQYNHLSDTCEKKSLSERWNYMPISDGSDSSKTKRIQRDLYSAFLLQHTIPQSCSFDKEALRIDYPNFVTMHDAEIHRLESLPKTITSMGVRRSHS

SEQ ID NO: 2232 - protein, 512 aa, unidentified
  REGION 1..512: note = Description of Unknown: uncultivated organism sequence
  REGION 1..512: note = Category: MG81 effectors
  REGION 1..512: note = Description: MG81-511 effector
MKKSSTDTCCLTLPLKLEKWQEDRLAKRFEIARQLYNTLVHAELKRLAQVKQTAEYRENERKIRALDWNDPGDQTKLKGLYKERRKSLKTAGFTDYSFTTDMGKYYKHFRDNIGSSVAVHGIAPQVWAAFDKLLFKKGGKKVHYKKPGEVNSVQGYSRTGKSGGTEIMFRGPYIEWKGLKLPLKLSPDNAYETDMLQRRVKLVRLVRRPGKRRGRWYAQLVLEAKPAIKADPVTGKAVHPIGSGPVGLDIGPQTLAYSAAGAAGLVELADRVQNIEQEKRCLQRKMDRSRRAANPDNYAEDGTIRRGVKLTHNKSKRYRRSQQELKYLQHRQAEIRKLQHIQLANHLLSLGDHFYVEKMEWSSLTHRAKKTVISEKTGKPRSKKRFGKSIANKAPAMLIEILRQKCKSLGLPNVVEINPADIKASQYNHLTGEYVKKSLSRRWNEMQDGEHLQRDLYSAFLLQHYDSMSKALDLDSLARDYPAFVQYHHREIERLHALPKTPASMGIRRSIA

SEQ ID NO: 2233 - protein, 511 aa, unidentified
  REGION 1..511: note = Description of Unknown: uncultivated organism sequence
  REGION 1..511: note = Category: MG81 effectors
  REGION 1..511: note = Description: MG81-512 effector
MREDSQNTCCLTLPLKIEKWQADRLIKRFEIARQIYNTLVHAELKKLQKMEASAEYRQIQDRIRELNPSDAGAKKEWKILKDKQEKLWKAWKITEYGFKSDIKAYYKYFNENIGAAGATHDIAPRVWAAFEKKLNDRTGKVKIQYKKAGDIRSLKGFSVSGKSGGTEIIFHKTYIAWKGLTLPLKLSPDNAYEKEMLMRRIKYVRILRKPGKHKDRWYAQLSLEGNPVVKLDPVSGLPRHPIGKGAVGIDIGPQTLAYSAEGGADLVELADRVQCIEQEKSRLQRKMDRSRRASNPDNYAQDGTIKRGVKLTHNKSRRYCKLQKELAYMLYRQAETRKRQHRELINRLLTMGDCFYIEDMHWNSLAHRAKKTEISEKTGRYKRKKRFGKSIANKAPAMLVDMLEQKCKSLELDVVMVNTSLKASQYNHQTGKYEKKTLSQRWNRMPDGEQIQRDLYSAFLLQHVVPEKNAFDNEALCRDYPKFVQYHHEVIERLRSLPKTISSMGIRRSVS

SEQ ID NO: 2234 - protein, 511 aa, unidentified
  REGION 1..511: note = Description of Unknown: uncultivated organism sequence
  REGION 1..511: note = Category: MG81 effectors
  REGION 1..511: note = Description: MG81-513 effector
MREHSQNTCCLTLPLKIEKWQADRLIKRFEIARQIYNTLVHAELKKLQKMEASAEYRQIQDRIRELNPSDAGAKKEWKILKDKQEKLWKAWKITEYGFKSDIKAYYKYFNENIGAAGATHDIAPRVWAAFEKKLNDRTGKVKIQYKKAGDIRSLKGFSVSGKSGGTEIIFHKTYIAWKGLTLPLKLSPDNAYEKEMLMRRIKYVRILRKPGKHKDRWYAQLSLEGNPVVKLDPVSGLPRHPIGKGAVGIDIGPQTLAYSAEGGADLVELADRVQCIEQEKSRLQRKMDRSRRASNPDNYAQDGTIKRGVKLTHNKSRRYCKLQKELAYMLYRQAETRKRQHRELINRLLTMGDCFYIEDMHWNSLAHRAKKTEISEKTGRYKRKKRFGKSIANKAPAMLVDMLEQKCKSLELDVVMVNTSLKASQYNHQTGKYEKKTLSQRWNRMPDGEQIQRDLYSAFLLQHVVPEKNAFDNEALCRDYPKFVQYHHEVIERLRSLPKTISSMGIRRSVS

SEQ ID NO: 2235 - protein, 536 aa, unidentified
  REGION 1..536: note = Description of Unknown: uncultivated organism sequence
  REGION 1..536: note = Category: MG81 effectors
  REGION 1..536: note = Description: MG81-514 effector
MDNEEKKEDGATCCLTLPLKLEKWQSDHLEKRFEIARQLYNTLVHAELKRIHRIERMPEYREIERLIEATTDKKEKWALKNQKKQFLRKNGINRNTFTTDMKRLYKHFNDNIGSNVAQHGIVSQVLTAFEKVYIENQSGEVHFKKPGDLRSVQGYSQKKSGGVEIMFREGKIIWNQQGNNDRKGVAREFPLKLSPDNSYEAEMLKKHVKFVRILRNEGKTKPHWYAQLVLEGKPAIKRDPASGAPKHPVGHGAVGIDIGTRTLAYSADSKVDLIELADLVQNIEQEKLLLQRKLDRSRRATNPENYKPDGTIKKGVKLTRNKSKRYRKIQHQLAMLQHRQADIRKRQHNELANYLLTLGDCFFVEDMDYRALTRKAKKTEISEKTGRYKRKKRFWKSIANKAPSMLIALLDQKCKSLNLEGVKKVDTAVKASQYNHQTDECKAKELKERWNIMPDGERIQRDLYSAFLLQHCRRDLPEYNRKELQKEFGEELYRVFDREALQRDYPQFVAYHHMTIQRLSELPHTIPSMGIRRIIS

SEQ ID NO: 2236 - protein, 542 aa, unidentified
  REGION 1..542: note = Description of Unknown: uncultivated organism sequence
  REGION 1..542: note = Category: MG81 effectors
  REGION 1..542: note = Description: MG81-515 effector
MATTDKKDKDKEKLRAYKFRLDPNQAQTIALYQAAGAARYTYNMLTAYNLEVNRLRDDYWKKRHDEGISDADIKKELNALTKEDKRYKQLKYGAFGTQYLTPEKKRHEQAEHRIENGEDPSVVWNQETERSANPWLHTANQRVLVSGLQNASDAWDNFWASRTGKRAGRLVGAPRFKKKGISRDSFTVPAAETMGAYGTAYLRGEAAYQQGKRTITDYRHVRLSYLGVIRTYDSTKPLVKAVAAGAEIRSYTVSRNADRWYVSFLVKFSEPIRRSATKRARAAGAVGVDLGVKYLASLSDSEAPQRFPNLKFAEGLPSLENPRWSEASSRRLHKLQRALARSQKGSNRRSRLVKQIARLHHMTALRRESNLHQLTKKLSTGYTLVGLEDLNVSGMTASAKGTVENPGKNVAQKSGLNRVVLDAAFGVFRYQLEYKTAWYGSTLEKIDRYFASSQTCSECGRKAKTKLTLRDRVFDCAYCGNMMDRDFNAAVNICREAQRLFNKKLASENGESLNGRGSRGALQGAETVEASRPPTSHRRGSP

SEQ ID NO: 2237 - protein, 512 aa, unidentified
  REGION 1..512: note = Description of Unknown: uncultivated organism sequence
  REGION 1..512: note = Category: MG81 effectors
  REGION 1..512: note = Description: MG81-516 effector
MKKCTTDTCCLTLPLKLEKWQEDRLAKRFEIARQIYNTLVRAEFKKLNELERTPEYKKILEQIHSLDWKDSGSRQRLNDLYRERNQILKNAKFTEYGFKSDMKFYYKHFSDNIGSCVAVHGIAPQVWAAFEKYLFKPEGKKVHFKRFGDVHSLRGYSKAGESGGAEITFCGTHIRWKNLELPIKLSPDNAYETEMLSRRVKYVRILRKPGKSKDRWYVQLSLEGKPAIKYDRNAGEIKHPVAHGAVGLDIGPQTLAYSAETTADLVELADQVQNIEQEKRRLQRKMDRSRRSTNPGNYNTDGTIRRGVKLTRNKSKAYCKLQRQLAYLQHTQAETRKRQHTELANYLLSLGDCFYVEEMKWSSLAHRAKETAVSEKTGRFKQKKRFGKSIANKAPSTLIGILQQKCESLGLPGIIYVPLSAKASQYNHLTGEYTPKPLSQRWNTMPDAQRVQRDLYSAFLLQHFDSQAGTYNLQSLQRDYPQFLQYHDQSIRRLSEMPKTLSSMGIRKSIRA

SEQ ID NO: 2238 - protein, 535 aa, unidentified
  REGION 1..535: note = Description of Unknown: uncultivated organism sequence
  REGION 1..535: note = Category: MG81 effectors
  REGION 1..535: note = Description: MG81-517 effector
MILLANNNNNNNNNNNNTDTCVLTLPLRVEKWQEDCLLKRFEAARRIYNSLLNFELKKLRQLERTVEYRQIQSVISSAYRSNTKDSLECKDAFKRREKLISANGISENGFKSDVKFFYKHFDGLIGSNVAVHCIAVQLWAAFDKYLSGSGKEIHFKRLGDISSLKGYYVKGKSGGCEIIFRGQYVEWTRKKKKLLLPLKIDPDNEYEREMLSRRVKYVRIIKKPGKNRLRWYAQLTLEGKPALKYSAGTGKPIHSVGKGNVGIDIGPQTVAYASDKEVALLELADRVTNIEHQKKKLQRKLDRSRRATNPDNYKPDGTIKRGVKLTRNKSKRYLKLQSKLAYIQHRQAEIRKLQHTCLANHMLTLGDRFFVEKMNWPGLAHRAKETSISEKTGRYKRKKRFGKSLANKAPAMFISILKRKCETLGLPGVVEVDTYSLKASQYNHLSDTYEKKSLSERWNYMPISDGSDSSKTKRIQRDLYSAFLLQHTIPQPCSFDKEALRIDYPNFVTMHDAEIHRLESLPKTITSMGVRRSHS

SEQ ID NO: 2239 - protein, 524 aa, unidentified
  REGION 1..524: note = Description of Unknown: uncultivated organism sequence
  REGION 1..524: note = Category: MG81 effectors
  REGION 1..524: note = Description: MG81-518 effector
MAKNNNTDTCVLTLPLRVEKWQEDCLLKRFEAARRIYNSLLNFELKKLRQLERTVEYRQIQSVISSAYRSNTKDSPECKDAFKRREKLISANGISEYGFKSDVKFFYKHFDGLIGSNVAVHCIAVQLWAAFDKYLRGSGKEIHFKRLGDISSLKGYSVKGKSGGREIIFRGQYIEWTRKKKKLLLPLKIDPDNEYEREMLSRRVKYVRIIKKPGKNRLRWYAQLTLEGKPALKYSAGTGKPIHSVGKGNVGIDIGPQTVAYASDKEVALLELADRVTNIEHQKKKLQRKLDRSRRATNPDNYKPDGTIKRGVKLTRNKSKRYLKLQSKLAYIQHRQAEIRKLQHTCLANHMLTLGDRFFVEKMNWPGLAHRAKETSISEKTGRYKRKKRFGKSLANKAPAMFISILKRKCETLGLPGVVEVDTYSLKASQYNHLSDTYEKKSLSERWNYMPISDGSDSSKTKRIQRDLYSAFLLQHTIPQPCSFDKEALRIDYPNFVTMHDAEIHRLESLPKTVTSMGVRRSHS

SEQ ID NO: 2240 - protein, 510 aa, unidentified
  REGION 1..510: note = Description of Unknown: uncultivated organism sequence
  REGION 1..510: note = Category: MG81 effectors
  REGION 1..510: note = Description: MG81-519 effector
MAARASTDTCCLTLPLLLEKWQSDRLEKRFEIARQIYNTLLRFELKKLERLKQTEEYQAILEKLQALDDSAQSGAERKTLFRELDAMRKKAGFTEYGFKSDIKDFYKHFNDNIGSNVAVHGIAPQVWQAFDRLFYGNGKKIHFKKRGDIHSLRGYSVAGKSGGVEIIYRGAFVEWKGLKLRIKHDSSNEYETEMLQNRIKYCRIVKREGKNKTRWYVQLMLEGKPAVKRDKQTDAPKHPVGQGSVGIDIGPQTIAYVANHEAALLELADKVQNIEREKRILLRKLDRSRRATNPDNYREDGTICSGKKLVWHKSNRYLRCQKQLSYLMRQQAEIRKAQHNELANHLLSLGDRFFVEDMEWPALTHRSKKTEISEKTGRYKKKKRFGKSVGNKAPALLIELLNQKLHSRGKEGVIKVPTTVRASQYNHITDTYQKKELSQRWNEMPDGKRIQRDLYSAFLLQHMNEAQTGFDRSALQRDYQAFTQLHDQVIDELRQAPKTIASMGVVRTKR

SEQ ID NO: 2241 - protein, 356 aa, unidentified
  REGION 1..356: note = Description of Unknown: uncultivated organism sequence
  REGION 1..356: note = Category: MG81 effectors
  REGION 1..356: note = Description: MG81-520 effector
MEATKTLKLRIKDKHAAVLSLMAREVNQVWNYCNETSSRAIRERREWLSGFDLQKLTAGYSKCEGVRIGSATVQLVCEEYATRRKQFKKARLNWRVSNPKSAKYSLGWVPFKAGGVKYKAGQVSFLGHRFSLWDSYGLSRFDLRAGSFSQDARGRWYLNVCVKVDVPKSAGTGLVGVDLGLKTAATCSDGEELASGLYRKHEGALGIAQRARKKGRVRAIHAKIANTRKDAMHKFSTGLVARNAAIFVGNVSADAMVKTRMAKSTLDAGWSMLKTMLEYKSHQAGIVFEEVNEAYTTQTCSSCGVIPSSSPKGRTGLRMRRWTCCGCGAEHDRDVNAAMNIAARGHARLAGGIPVL

SEQ ID NO: 2242 - protein, 534 aa, unidentified
  REGION 1..534: note = Description of Unknown: uncultivated organism sequence
  REGION 1..534: note = Category: MG81 effectors
  REGION 1..534: note = Description: MG81-521 effector
MGWKSTGRGGTRVKRSSTDTCCLTLPLKLEKWQSDRLEKRFEIGRQIYNTIVHAELKKLRKLERTQQYQEIEQKLENAKQEETKELWKKKRQLLDQNGLSENHFKADMKYYYPHFKDNIASSVAVHGIASQAWTAFEKVLLSKDGKMVHFKKKGELSSLRGYSQAGKSGGIEIIFRGSYVEWKGLKLPLQLSPNNEYETEMLSKRVKYVRILRKDGKTKTHWYAQLALEGKPAVKRDSISGAPKHPVGHGVVGIDIGTRTLAYSTDSAVNLLELADRVQNIEQEKRRLQRKMDRSRRAMNPGNYKPDGSIKQGVKLTWNNSKRYKRIQHQYAMIQHHQADIRKQQHNELANYLLTLGDCFFVENMSYCDLAHRANKTEISEKTGRYKRKKRFGKSIANKAPAMLITMLKQKCQSRGLKGVKEVDTHVRASQYNHQTDTCIEKALENRWNVMPDGERIQRDLYSAFLLQHCKQGLSEYNRKELKKEFGEELYRVFDREALQRDYPQFVAYHHMTIQRLSELPHTIPSMGIRRIIS

SEQ ID NO: 2243 - protein, 538 aa, unidentified
  REGION 1..538: note = Description of Unknown: uncultivated organism sequence
  REGION 1..538: note = Category: MG81 effectors
  REGION 1..538: note = Description: MG81-522 effector
MNNEEKEKEGATCCLTLPLKLEKWQSDHLEKRFEIARQLYNTLVHAELKKKCQVERMPEYQEIMKMIDTASNQKEKWALEKKRKAFLEENGFSRNAFKADMEKYYKHFNDNIGANVALHGITAQVWIAFDKVFVDNYKQKGKVHFKKPGELCSVQGYSQKKSGGKEIMFREDRIIWNQQGNRDRKKVKREFLLKLSPDNPYEAEMLKRHVKFVRILRKDGKTKPHWYAQLVLEGKPAVKRDPASGAPKHPIGHGVVGIDIGTRTLAYSTDSEVNLLELADRVQNIEQEKRRLQRKMDRSRRAMNPGNYKPDGSIKQGVKLTWNNSKRYKRIQHQYAMIQHHQADIRKQQHNELANYLLTLGDCFFVENMSYCDLAHRANKTEISEKTGRYKRKKRFGKSIANKAPAMLITMLKQKCQSRGLEGVKEVDTHVCASQYNHQTDTCIKKALENRWNIMPDGERIQRDLYSAFLLQHCRRDLPEYNRKELQKEFGEELYRVFDREVLQRDYPQFVAYHHMTIQRLSELPHTIASMGIRRSIS

SEQ ID NO: 2244 - protein, 505 aa, unidentified
  REGION 1..505: note = Description of Unknown: uncultivated organism sequence
  REGION 1..505: note = Category: MG81 effectors
  REGION 1..505: note = Description: MG81-523 effector
MAKATTDTCCLTLPLKLEKWQEDRLDKRLEIARKIYNTLVNFELKKLRKLEANSDYIALQEKLKETTNNTERKKLYKEIDKLRKEAGFTEYAFKSDVKAFYKVFNANIGSAVAVHGIAPQVWAAFDRLFYGNGKAVHFKRYGEINSLRGYSVAGKSGGVEIIYHETHIEWKGLKLPIKLDPDNDYEREMLQYRVKYCRIIRKPGRNKNHWYVQLSLEGKPAVKYDRNTGEVRHPVGSGAVGIDIGPQTIAYASDTEVALKELADKVNNIEQKKRVLQRKLDRSRRATNPDNYAPDGTIRRGVKLTRNKSRKYLKCQKELAYIQRQQADIRKRQHNELANHLLILGDRFYVEDMEWPALTHRAKKTEISEKTGKIKRKKRFGKSVGNKAPASLIGLLDLKLKSRGLAGVIRVDTRVRASQYNHLSDDYRKKELRDRWNDMPDGRHIQRDLYSAFLLQHMNEKQDGFDKAALHRDYEQFTERHNQCIEELRTAPKTLASMGIVRRAG

SEQ ID NO: 2245 - protein, 521 aa, unidentified
  REGION 1..521: note = Description of Unknown: uncultivated organism sequence
  REGION 1..521: note = Category: MG81 effectors
  REGION 1..521: note = Description: MG81-524 effector
MLILGRRMYMPAKQKEGGNRCVLTLPLLTEPWQEHIIEKRFKIIEHLKNQLISIELRKLKNLQRTKAYKNLIKQIESVPKSERTALYKERNKMLKDAGFSQYTFMDDMAGKKSLMQKHFESHINVQIAHKAAIDVWSSFEKFLFGTGQIVHYQKRGTLSSVASKSPKTGMFYYSDENIFKWSGGGTKPKGGIILCLRVAPVKTNYEKEMVANNETKYYRVVRKWMKTKYKYYLQITFAGKPADKHREISTGRVGIDIGTQTIAIASDKSVKLLELADKVNKNHIKKCELQRKLDRSRRYTNPDNFNPDGTVKRGTKGHKLKWNKSKHYIEIAGKIRELERKNADIRKYQHTCLANDILAMGNQIYIEPMNYKGLQKRAKETQVDEKGRYKKKKRFGKSLANKAPAMFVTILKTKVEQHGGEVYEVDIMSYRASQCDHTTGEYTKHGLNDRWRILGNGDKVQRDLYSAFLIKNSNKTHDEIDLDKCSKTYDNFKKLHDKEIENIRNEVKLRERKNISSYGIA

SEQ ID NO: 2246 - protein, 511 aa, unidentified
  REGION 1..511: note = Description of Unknown: uncultivated organism sequence
  REGION 1..511: note = Category: MG81 effectors
  REGION 1..511: note = Description: MG81-525 effector
MGKSSTDTCCLTLPLKLEKWQEDRLAKRFEIARQIYNTMVRAELKKLERVKQLPEYRKNQKEIQELDWKNSADKPRLKELRANQKRILQKQGFTEYGFKADSKDYYKHFIENIGSSVATHGIAPQVWNAFDKMLFQKDGKVVHFKRHGDVHSLKGGSVTHKSGGAEIMFRKTYIEWKGLKLPLKLSPNNAYEAEMLSYRVKYVRILRTRGKTKDRWYAQLSLEGKPAVKFDSSTGKLVHPVGRGAVGLDIGPQTLAYAAADEANLVELADQVQNIEQEKRRLQRKLDRSRRATNPDNYNENGTIRRGVKLTHNKSKRYCKLQKELSWIQHCQAETRKRQHIALANHLLSLGDCFYVEPMAWPSLTHRAKKTEVSEKTGKIKRKKRFGKSVANKAPASLIGILKLKCISLGLTGVVEVPMLLRASQYNHQSKDYEKKSLSQRWNDMPDGNRIQRDLYSAFLLQHYNSQSESFDQETLERDYPQFVRLHNQTIQRLSALPKTPSSMGIRRSVS

SEQ ID NO: 2247 - protein, 528 aa, unidentified
  REGION 1..528: note = Description of Unknown: uncultivated organism sequence
  REGION 1..528: note = Category: MG81 effectors
  REGION 1..528: note = Description: MG81-526 effector
MILLTKNNNNTDTCVLTLPLRVEKWQEDCLLKRFEAARRIYNSLLNFELKKLRQLERTVEYRQIQSVISSAYRSNTKDSPECKDAFKRREKLISANGISEYGFKSDVKFFYKHFDGLIGSNVAVHCIAVQLWAAFDKYLRGSGKEIHFKRLGDISSLKGYSVKGKSGGCEIIFRGQYIEWTRKKKKLLLPLKIDPDNEYEREMLSRRVKYVRIIKKPGKNRLRWYAQLTLEGKPALKYSAETGKPIHSVGKGNVGIDIGPQTVAYASDKEVALLELADRVTNIEHQKKKLQRKLDRSRRATNPDNYKPDGTIKRGVKLTRNKSKRYLKLQSKLAYIQHRQAEIRKLQHTCLANHMLTLGDRFFVGKMNWPGLAHRAKETSISEKTGRYKRKKRFGKSLANKAPAMFISILKRKCETLGLPGVVEVDTYNLKASQYNHLSDTCEKKSLSERWNYMPISDGSDSSKTKRIQRDLYSAFLLQHTIPQPCSFDKEALRIDYPNFVIMHDAEIHRLESLPKTITSMGVRRSHS

SEQ ID NO: 2248 - protein, 511 aa, unidentified
  REGION 1..511: note = Description of Unknown: uncultivated organism sequence
  REGION 1..511: note = Category: MG81 effectors
  REGION 1..511: note = Description: MG81-527 effector
MAKCSTDTCCLTLPLRLEKWQEDRLAKRFEIARQIYNTMVRAELKKLRAMEQSEPYKANQEKIQALDWKTQTDKQALKALYKERDKLLRDGGFSEYGFKSDIKNYYKHFNNNIGSNVAFHGIAPQVWAAFEKMLFKKEGKKVHFKKKGDIHSLRGYSAAGKSGGVEIIFRETYIEWKGLKLPLKLSPDNIYETQMLSYRVKYVRLLRKPGKRKDRWYAQLSLEGKPVIKYNPKTGEVRHPIGKGAVGLDIGPQTLAYSAATGADLVELANQVQNVEQEKRRLQRKLDRSRRATNPGNYADDGTIRRGIALTHNKSKRYLRTQQELKYLQHQQAEIRKRQHTELANHLLSLGDCFYVEKMVWTSLTHRAKETEISEKTGKIKRKKRFGKSVANKAPATLIGILQRKSAALGIPGVIEVPPSVKASQYNHQSGTYTPKPLSQRWNNMPDGERIQRDLYSAFLLQHYDPQTNTFDANSLHQDYPQFVQYHHDAVLRLYAMPKTPSSMGIKRSLR

SEQ ID NO: 2249 - protein, 333 aa, unidentified
  REGION 1..333: note = Description of Unknown: uncultivated organism sequence
  REGION 1..333: note = Category: MG81 effectors
  REGION 1..333: note = Description: MG81-528 effector
MAKCSTDTCCLTLPLRLEKWQEDRLAKRFEIARQIYNTMVRAELKKLRAMEQSEPYKANQEKIQALDWKTQADKQALKALYKERDKLLQDGGFSERGFKSDIKNYYKHFNNNIGSNVAFHGIAPQVWAAFEKMLFKKEGKKVHFKKKGDIRSLRGYSATGRSGGVEIIFRETYIEWKGLKLPLKLSPDNIYETQMLSYRVKYVRLLRKPGKRKDRWYAQLSLEGKPVIKYNPKTGEVRHPIGKGAVGLDIGPQTLAYSAATGADLVELANQVQNVEQEKRRLQRKLDRSRRATNPGNYADDGTIRRGIALTHNKSKRYLKNTAGIKISPASAS

SEQ ID NO: 2250 - protein, 512 aa, unidentified
  REGION 1..512: note = Description of Unknown: uncultivated organism sequence
  REGION 1..512: note = Category: MG81 effectors
  REGION 1..512: note = Description: MG81-529 effector
MPTKQKEDSNRCVLTLPLLTEPWQEHIIEKRFKIIEHLKNQLISIELRKLKNLQRTKAYKNLIKQIESVPKSERTVLYKERNKMLKDAGFSQYTFMDDMAGKKSLMQKHFESHINVQIAHKAAIDVWSSFEKFLFGTGQIVHYQKRGTLSSVASKSPKTGMFYYSDENIFKWSGGGTKPKGGIILCLRVASVKTNYEKEMVANNEIKYYRVVRKWMKTKYKYYLQITFAGKPADKHREISTGRVGIDIGTQTIAIASDKSVKLLELADKVNKNHIKKCELQRKLDRSRRYTNPDNFNPDGTVKRGTKGHKLKWNKSKHYIEIAGKIRELERKNADIRKYQHTCLANDVLAMENQIYIEPMNYKGLQKRAKETQVDEKGRYKKKKRFGKSLANKAPAMFVTILKTKAEQHGGEVYEVDIMSYRASQCDHTTGEYTKHGLNDRWRILGNGDKVQRDLYSAFLIKNSNKTHDEIDLDKCSKTYDSFKKLHDKEIENIRNEVILRKRRNISSYGIA

SEQ ID NO: 2251 - protein, 508 aa, unidentified
  REGION 1..508: note = Description of Unknown: uncultivated organism sequence
  REGION 1..508: note = Category: MG81 effectors
  REGION 1..508: note = Description: MG81-530 effector
MADKECCVLTLPLQTEIWQEHIIEKRFAIMEHLKNQLIAKELRRLKNLERTKEYRNLIDEINNTPKEKRKALFSKRRKLLKDSGFSEYDFKDDIAGKNSLMQKHFIEHIATQIAHKLASDVWRSFDKFLFGNGRFIHFSKRGSLRSVASQKNGNGMTYKNGYFIWNGGQSKNKIILKIKVTPPKNEYEKEMLSKKIKYLRIVKKWVKTRYKYYLQFALEGKPVKKDRIVNKGNVGIDIGTQTVAISSADSVKILELADKIDKNHTKKKILQRKMDRSRRYTNPQNYNEDGTIKKPPKEQRFSWYKSKKYIQLAGKVRELERKNADIRKYQHTCLANWILSLGDTVYVEQMNFSGLQRRAKETKIDKNGKYAKKKRYGKSLANKAPSMFLTILGSKLNQYGGQLNKINTYEFKASQYDHTDDTFTKHNRSERWHILSNGDKNQRDLYSAFLIMNSDISLKHCNREKCNETYSNFKVLQDKEIERLYSDIRKGNCKNISSFGFQRNAKAM

SEQ ID NO: 2252 - protein, 1308 aa, unidentified
  REGION 1..1308: note = Description of Unknown: uncultivated organism sequence
  REGION 1..1308: note = Category: MG81 effectors
  REGION 1..1308: note = Description: MG81-531 effector
MKVSKVNHVRAAVNKKGILYNTPVSEKRNVIEIKGHVREVNEKAQKLYATMGTIDEEIEKVSPKDLNNFKRVFDGYIKECAKTMSRRANKYGFDASKFRNVFEQTTYYSSKKDRTTGEWKNESIASGRFFKWNSDPKTVINQLINTYLRKSLYRTEKAGTKEVYLPDALKKLALAVYDKENFPNGVNALSYEEKTALAQAIYKDYSGEKKIDSIAESIQSQDVKVQSFSKDGKTVLKLSSAEDLNKTNPGKNKGFIFEFLKDFCNADKSGQDELRKHMRKLILLYYCGPEAYRTAEDNGIFADGFGECLPDEAESFCQDAIEEMANLPIAEEKGEKKRVRAAIKKALEEQIAASYRIAVKEPGITESDRFWIDYIEKTAGKIIVDCRMSQWQSRCMKKSLCLMTYQEWETYISSRFIDMGKAAYHFAMPKDLTSLNAASFGTVNALFKDGITSFDYEYIKAEESIEREISGYISSALNTFTASSILPAQREELLAKKDILSLRAEDENLSENMMKNILRFFGGSSVWKEKQEFSKENRVAFFSALQDRLRYVRNSSFHYASGEDTSRVKENPAVLALISGETERVGSIFAKKYYSNNVPMFYTEKDIEKMMENLYAKENFRPAQIPSFQSVVNHSDMDGVLTALVGAGYNSKIKSVGADITKQYRSAMYFVLKEIYYNDFLKLEDIKERFRREALNYKSPQATEKKDPPAESFRARISDLCEDKTITFAEICQQLMTDMQLQQGEMAKKPESKQNVTDKKAYIHFRLILESCIRSAFLDYVKNDGKYAFLLAPMYRKEAFSILKEEEFLPSFKPAKYSALLQGFDAKAESWFVLAHFLRKSELNHLIGAMKGYIEYTENIDRRAKYLSGERFNVSKKREDYKSIIPILEFVMNFNGQISNTITDYFDSEEEYADYLNSFILFAEEKDDKKIALKNFCNLPAPGSPTGKIGIFYDEQNPILNRNVVLSKMYGIDELFIGVYRKNRIKLSDYQSYYRLSKELESVFKSGVCKSEDEVKKLKKFQHMKNRVEMTDIATFTGIVNDLYSQLISWTYLRERDFMYYLLGYYYVKLYQTESVQNDSPLRTITSSDVSKAFSIQNGAVLYQIVAMNTPGLPLIVFEKDGKPSLDTANAANGTGIKVVRFVLDYLGGEETYSDVLAFFGNYKKNNDDVVKMRNYIDHFSYFAGYERSLMDLYSDFFDRFFEYDQKLHKSVSFVFKNILLRYFVISDLNFVSVYRYSYKDKKEGTDKCCGLELKKERKGGDLSLKADNVTIKYKNQNDPQKVQVFARDDEFLSRLEGILTYKRGESR

SEQ ID NO: 2253 - protein, 526 aa, unidentified
  REGION 1..526: note = Description of Unknown: uncultivated organism sequence
  REGION 1..526: note = Category: MG81 effectors
  REGION 1..526: note = Description: MG81-532 effector
MAKNNNNNTDTCVLTLPLRVEKWQEDCLLKRFEAARRIYNSLLNFELKKLRQLECTVEYRQIQSVISSAYRSNTKDSPECKDAFKRREKLISANGISEYGFKSDVKFFYKHFDGLIGSSVAVHCIAVQLWAAFDKYLRGSGKEIHFKRLGEISSLKGYSVKGKSGGLEIIFRGQYVEWTRKKKKLLLPLKIDPDNEYEREMLSRRVKYVRIIKKPGKNRLRWYAQLTLEGKPALKYSAETGKPIHSVGKGNVGIDIGPQTVAYASDKEVALLELADRVTNIEHQKKKLQRKLDRSRRATNPDNYKPDGTIKRGVKLTRNKSKRYLKLQSKLAYIQHRQAEIRKLQHTCLANHMLTLGDRFFVEKMNWPGLAHRAKETSISEKTGRYKRKKRFGKSLANKAPAMFISILKQKCETLGLPGVVEVDTFRLKASQYNHLSDTCEKKSLSERWNYMPISDGSDSSKTKRIQRDLYSAFLLQHTIPQSCSFDKEALRIDYPNFVTMHDAEIHRLESLPKTITSMGVRRSHS

SEQ ID NO: 2254 - protein, 508 aa, unidentified
  REGION 1..508: note = Description of Unknown: uncultivated organism sequence
  REGION 1..508: note = Category: MG81 effectors
  REGION 1..508: note = Description: MG81-533 effector
MADKECCVLTLPLQTEIWQEHIIEKRFAIMEHLKNQLIAKELRRLKNLERTKEYRNLIDEINNTPKEKRKALFSKRRKLLKDSGFSEYDFKDDIAGKNSLMQKHFIEHIATQIAHKLASDVWRSFDKFLFGNGRFIHFSKRGSLRSVASQKNGNGMTYKNGYFIWNGGQSKNKIILKIKVTPPKNEYEKEMLSKKIKYLRIVKKWVKTRYKYYLQFALEGKPVKKDRIVNKGNVGIDIGTQTVAISSADSVKILELADKIDKNHTKKKILQRKMDRSRRYTNPQNYNEDGTIKKPPKGQRFSWYKSKKYIQLAGKVRELERKNADIRKYQHACLANWILSLGDTVYVEQMNFSGLQRRAKETKIDKNGKYAKKKRYGKSLANKAPSMFLTILGSKLNQYGGQLNKINTYEFKASQYDHTDDTFTKHNRSERWHILSNGDKNQRDLYSAFLIMNSDISLKHCNRKKCNETYSNFKVLQDKEIERLYSDIRKGNCKNISSFGFQRNAKAM

SEQ ID NO: 2255 - protein, 540 aa, unidentified
  REGION 1..540: note = Description of Unknown: uncultivated organism sequence
  REGION 1..540: note = Category: MG81 effectors
  REGION 1..540: note = Description: MG81-534 effector
MATTDKKDEENLRAYKFRLDPNQAQTTALYQAVGAARYTYNMLTAYNLEVNRLRDDYWKRRHDEDISDADIKKELNALAKEDKRYKQLNYGAFGTQYLTPEKKRHEQAEHRIENGEDPSVVWNQETERSANPWLHTANQRVLVSGLQNASDAWDNFWASRTGKRAGRLVGTPRFKKKGVSRDSFTVPAPEKMGAYGTAYLRGEPAYKQGRRKITDYRHVRLSYLGTIRTFNSTKPLVKAVVAGAKIRSYTVSRNADRWYVSFLVKFSEPIRRSATKRARAAGSVGVDLGVKYLASLSDSEAPQRFPNLKFVEGLPSLENPRWSEASSRRLHKLQRALARSQKGSNRRSRLVKQIARLHHMTALRRESNLHQLTKKLATEYTLVGFEDLNVSGMTASAKGTVENPGKNVAQKSGLNRVVLDAAFGVFRNQLEYKAVWYGSAFEKVDRYFASSQTCSECGRKAKTKLTLRDRVFDCAYCGNMMDRDLNAAVNICREAQRLFDEKLASEDRESLNGRGSRGALRGAETVEASRPPASHRRGSP

SEQ ID NO: 2256 - protein, 522 aa, unidentified
  REGION 1..522: note = Description of Unknown: uncultivated organism sequence
  REGION 1..522: note = Category: MG81 effectors
  REGION 1..522: note = Description: MG81-535 effector
MANNNNNTDTCVLTLPLRVEKWQEDCLLKRFEAARRIYNSLLNFELKKLRQLERTVEYRQIQSVISSAYRSNTKDSPECKAALKRREKLIDANDLTEYGFKSDVKFFYKHFDGLIGSSVAVHCIAVQLWAAFNKYLCGNGKEIHFKRLGDISSLKGYSVKGKSGGCEIIFRGQYVEWTRKKKKLLLPLKIDPDNEYEREMLSRRVKYVRIIKKPGKNRLRWYAQLTLEGKPALKYSAETGKPIHSVGKGDVGIDIGPQTVAYASDKEVALLELADRVTNIEHQKKKLQRKLDRSRRATNPDNYKPDGTIKRGVKLTRNKSKRYLKLQSKLAYIQHRQAEIRKLQHTCLANHMLTLGDRFFVEKMNWPGLAHRAKETSISEKTGRYKRKKRFGKSLANKAPAMFISILKQKCETLGLPGVVEVDTFRLKASQYNHLSDTCEKKNLSERWNYMPISDGSDSSKTKRIQRDLYSAFLLQHTIPQSCSFDKEALRIDYPNFVTMHDAEIHRLESQNDHKHGCSAKS

SEQ ID NO: 2257 - protein, 521 aa, unidentified
  REGION 1..521: note = Description of Unknown: uncultivated organism sequence
  REGION 1..521: note = Category: MG81 effectors
  REGION 1..521: note = Description: MG81-536 effector
MMVTWKEGIPVGKSSTDTCCLTLPLKLEKWQEDRLAKRFEIARQIYNTMVRAELKKLERVKQLPEYRKNQKEIQTLDGKNSADRARLKELYGNQRKILQKQGFTEYGFKADSKDYYKHFIENIGSSVATHGIAPQVWNAFDKMLFQKDGKVVHFKRYGDVHSLKGGSVAHKSGGAEIMFRKTYIEWKGLKLPLKLSPNNAYEAEMLSYRVKYVRILRTRGKTKDRWYAQLSLEGKPAVKYDSSTGKPVHPVGRGAVGLDIGPQTLAYAAANEANLVELADQVQNIEQEKRRLQRKLDRSRRATNPDNYNENGTIRRGVKLTHNKSKRYCKLQKELSWIQHCQAETRKRQHIALANHLLSLGDCFYVEPMAWPSLTHRAKKTEVSEKTGRIKRKKRFGKSVANKAPASLIGILRLKCISLGLTGVVEVPMLLKASQYNHQSKDCAKKSLSQRWNDMPDGNRIQRDLYSAFLLQHYDSQSESFDQETLERDYPQFVRLHNQTIQRLSALPKTPSSMGIRRSVS

SEQ ID NO: 2258 - protein, 522 aa, unidentified
  REGION 1..522: note = Description of Unknown: uncultivated organism sequence
  REGION 1..522: note = Category: MG81 effectors
  REGION 1..522: note = Description: MG81-537 effector
MKKSSTDTCCLTLPLKLEKWQSDRLEKRFEIGRQIYNTVVRAELKKLQQVERTPQYREIEQKLKGAKQEEAKELWKKRTQLLSQSGFSEYGFKSDMKYYYQHFKENIGSSVAVHGIASQVWTAFEKVLFSKDGKMVHFKKKGELSSLRGFSQAGKSGGVEIIFRGSYVEWKGLKLPLKLSPDNDYETEMLSKRVKYVRILRQDGKTKPHWYAQLVLEGKPAIKRDPASGAPKHPIGHGVVGIDIGTRTLAYSADSKVDLIELADRVQNIEQEKMLLQRKLDRSRRATNPGNYNPDGTIKCGVKLTRNKSKRYRKIQHQLAMLQHRQADIRKRQHNELANYLLTLGDCFFVEDMDYRALTRKAKKTEISEKTGRYKRKKRFGKSIANKAPSMLIALLDQKCKSLNLEGVKKVDTAVKASQYNHQTDECKAKELKERWNIMPDGERIQRDLYSAFLLQHCRRDLPEYNRKKLQETFGNELYRVFDREALQRDYPKFVEYHRETIQRLSALPKTIASMGIRRIIS

SEQ ID NO: 2259 - protein, 495 aa, unidentified
  REGION 1..495: note = Description of Unknown: uncultivated organism sequence
  REGION 1..495: note = Category: MG81 effectors
  REGION 1..495: note = Description: MG81-538 effector
MAGKSDKARCVLTLPLLTEPWQEHIIEKRFRIMEHLKNSLIALELRKLKNIQRTKQYRQLKAEISNAPKENRKTLDKKRKELLINAGFSERAFKDDMTNMQKHFVEHISTHAAHKSASDVWRSFDKVLFHTGRKIHFIRRGSLSSIACQTDGNGMRFRNGMLHWNGGRCKNKVKLELRVACPKTPYECAMLEKKIKFERIIRKWVKTRYKYYVQFTLVGNAVPKPRKTGTGRVGIDIGPSSIAIASSQEVRLMELADKINQNHLRKVALQQKMDRSRRATNPDNFNENKTIRRGVKLSWHYSKHYQKLRGQVRELERKNADIRKYQHTCLANYILSLGTEVYIEQMNFKGLQARAKETTYNKNGRANRKKRFGKSIANRAPAMLVTILETKLKSYAGTELHKVNTWSYRASQYDHITDTYTKKLLRQRWAELGNGDRIQRDLYSAFLLMNSQPSLQSTDRERCSKTYSQFKSLHDQEIYRLQQTPERHLSSFGIA

SEQ ID NO: 2260 - protein, 538 aa, unidentified
  REGION 1..538: note = Description of Unknown: uncultivated organism sequence
  REGION 1..538: note = Category: MG81 effectors
  REGION 1..538: note = Description: MG81-539 effector
MDNEEKEKDGATCCLTLPLKLEKWQSDHLEKRFEIARQLYNTLVHAELKKKCQVERMPEYQEIMKMIDTASNQKEKWALEKKRKAFLEENGFSRNAFKADMEKYYKHFNDNIGANVALHGITAQVWIAFDKVFVDNYKQKGKVHFKKPGELCSVQGYSQKKSGGKEIMFREDRIIWNQQGNRDRKKVKREFLLKLSPDNPYEAEMLKRHVKFVRILRKDGKTKPHWYAQLVLEGKPAVKRDPASGAPKHPIGHGVVGIDIGTRTLAYSTDKEVNLLELADRVQNIEQEKRRLQRKMDRSRRATNPENYNPDGTFKRGVKLTRNKSKRYKRIQHQYAMIQHHQADIRKQQHNELANYLLTLGDCFFVENMSYCDLVHRANKTEISEKTGRYKRKKRFGKSIANKAPAMLITMLKQKCQSRGLEGVKEVDTHVRASQYNHQTDTCIEKALENRWNVMPDGERIQRDLYSAFLLQHCKQGLPEYNRKELKKEFGEELYRVFDREALQRDYPQFVAYHHMTIQRLSELPHTIPSMGIRRIIS

SEQ ID NO: 2261 - protein, 538 aa, unidentified
  REGION 1..538: note = Description of Unknown: uncultivated organism sequence
  REGION 1..538: note = Category: MG81 effectors
  REGION 1..538: note = Description: MG81-540 effector
MDNEEKEKDGATCCLTLPLKLEKWQSDHLEKRFEIARQLYNTLVHAELKKKCQVERMPEYQEIMKMIDAASNQKEKWALEKKRKAFLEENGFSRNAFKADMEKYYKHFNDNIGANVALHGITAQVWIAFDKVFVDNYKQKGKVHFKKPGELCSVQGYSQKKSGGKEIMFREDRIIWNQQGNRDRKKVKREFLLKLSPNNPYEAEMLKRHVKFVRILRKDGKTKPHWYAQLVLEGKPAVKRDPISSAPKHPVGHGVVGIDIGTRTLAYSTDKEVNLLELADHVQNIEQEKRRLQRKMDRSRCATNPENYNPDGTFKRGVKLTRNKSKRYRRIQHQLAMIQHHQADIRKQQHNELANYLLTLGDCFFVENMSYCDLVHRANKTEISEKTGRYKRKKRFGKSIANKAPAMLITMLKQKCQSRGLKGVKEVDTHVRASQYNHQTDTCIEKALENRWNVMPDGERIQRDLYSAFLLQHCKQGLPEYNRKELKKEFGEELYRVFDREALQRDYPQFVAYHHMTIQRLSELPHTIPSMGIRRIIS

SEQ ID NO: 2262 - protein, 482 aa, unidentified
  REGION 1..482: note = Description of Unknown: uncultivated organism sequence
  REGION 1..482: note = Category: MG81 effectors
  REGION 1..482: note = Description: MG81-541 effector
MDQRELRGLRTYALYCIVAAALLAVVFLFYFSRTKQNIQEQAEAQLTEVTRQYANAIKADMRGNIQTVEALAHVFGELGQGNPETIIPLITGAVGTLRLKRMGFVTLDGMAHTTDGLTFDARDRLYFKRALTASPTVAILLVDKTDNTPINVYVSPIVHKGKVLGALFATVQTDAFIMSIDDRLFNGSGQVLVTNNQGHILFRGRGPIQLARYNNIAELIPTGAPAATGNDINDISDTFGSGGLFRYDGSPYYMAHSKLEITSTDWHIFSIVPEDTLTANVGTIQREVLYLMLFFIGLSMVFLWLVLRMQGRQAKRLRRAKQFLETVIENIPGGFFRYSNDEKQEFDYISEGFLKLLGHTRASFREAYGNRFDNLVHPEDRKRVLDSINSQIKHSDYDTVEYRVTKADGRILWLFDKAQLVRDENGRHRHGHHVPAQYAAGTQNQRGALPYPHRAFRAHHLRTRPRNPLLLFLSPLQGKIRL

SEQ ID NO: 2263 - protein, 534 aa, unidentified
  REGION 1..534: note = Description of Unknown: uncultivated organism sequence
  REGION 1..534: note = Category: MG81 effectors
  REGION 1..534: note = Description: MG81-542 effector
MGWKSKGRGGTLVKKSSTDTCCLTLPLKLEKWQSDRLEKRFEIGRQIYNTIVHAELKKLRKLERTQQYQEIEQKLENAKQEETKELWKKKRQLLDQNGLSENHFKADMKYYYPHFKNNIASSVAVHGIASQAWTAFEKVLLSKDGKMVHFKKKGELSSLRGYSQAGKSGGIEIIFRGSYVEWKGLKLPLQLSPNNEYETEMLSKRVKYVRILRKDGKTKTHWYAQLALEGKPAVKRDSISGAPKHPVGHGVVGIDIGTRTLAYSADSKVDLIELADRVQNIEQEKMLLQRKLDRSRRATNPENYKPDGSIKQGVKLTWNNSKRYKRIQHQYAMIQHHQADIRKQQHNELANYLLTLGDCFFVEDMDYRALTRKAKKTEISEKTGRYKRKKRFGKSIANKAPSMLIALLDQKCKSLNLEGVKKVDTAVKASQYNHQTDECKAKELKERWNIMPDGERIQRDLYSAFLLQHCRRDLPEYNRKKLQETFGNELYRVFDREALQRDYPKFVEYHRETIQRLSALPKTIASMGIRRIIS

SEQ ID NO: 2264 - protein, 546 aa, unidentified
  REGION 1..546: note = Description of Unknown: uncultivated organism sequence
  REGION 1..546: note = Category: MG81 effectors
  REGION 1..546: note = Description: MG81-543 effector
MANVVYITFGFFRLIMTGLLQPNKNDGIFFQYYQCEVRWAPLAKATTDTCCLTLPLKLEKWHADRLEKRLEIARQIYNTLLRFELKKLHRLEESTEYIDIQNLLKETTDNVERNKLYKQLNKLRQDAGFSEYTFKADIKDFYKHFNNNIGSSVAVHGIAPQVWTAFDRLFYGSGKVVHFKKRGELTSLRGYSVAGKSGGVEIIFRGTYIEWKGLKLPIKLDPKNEYENEMLRQRIKYCRIIKKPGRSKNHWYVQLMLEGKPVIKVNKNTGELLHPVGKGAVGIDIGPQTIAYVSEKEVALKELADQINNIEQEKRVLQRKLDRSRRAMNPGNYEADGTIKRGVKLTRNKSKRYIKTQCELAYLLRRQADIRKRQHNELANHLLSLGDRFYVEDMEWPALAHRAKKTEISEKTGKFKRKKRFGKSIGNKAPSTLIGLLDLKLKSRGLEGVMRVDTKVRASQYNHLTDDYKKKELSERWNNMPDGRRIQRDLYSAFLLQHMNETQTDFDKDALIRDYEQFTVFHDQCIEELRRAPKTLASMGLVRRAS

SEQ ID NO: 2265 - protein, 341 aa, unidentified
  REGION 1..341: note = Description of Unknown: uncultivated organism sequence
  REGION 1..341: note = Category: MG81 effectors
  REGION 1..341: note = Description: MG81-544 effector
MLPLKIDPDNEYEREMLSRRVKYVRIIKKPGKNRLRWYAQLTLEGKPALKYSAETGKPIHSVGKGDVGIDIGPQTVAYASDKEVALLELADRVTNIEHQKKNSQRKLDRSRRATNPDNYKPDGTIKRGVKLTRNKSKRYLKLQSKLAYIQHRQAEIRKLQHTCLANHMLTLGDRFFVEKMNWPGLAHRAKETSISEKTGRYKRKKRFGKSLANKAPAMFISILKQKCETLGLPGVVEVDTFRLKASQYNHLSDTCEKKSLSERWNYMPISDGSDSSKTKRIQRDLYSAFLLQHTIPQSCSFDKEALRIDYPNFVTMHDAEIHRLESLPKTITSMGVRRSHS

SEQ ID NO: 2266 - protein, 511 aa, unidentified
  REGION 1..511: note = Description of Unknown: uncultivated organism sequence
  REGION 1..511: note = Category: MG81 effectors
  REGION 1..511: note = Description: MG81-545 effector
MAKCSTDTCCLTLPLRLEKWQEDRLAKRFEIARQIYNTMVRAELKKLRAMEQSEPYKANQEKIQALDWKTQADKQALKALYKERDKLLRDGGFSEYGFKSDIKNYYKHFNNNIGSSVAVHGIAPQVWAAFEKMLFKKEGKKVHFKKKGDIRSLRGYSATGKSGGVEIIFRETYIEWKGLKLPLKLSPDNIYETQMLSYRVKYVRLLRKPGKRKDRWYAQLSLEGKPVIKYNPKTGEVRHPIGKGAVGLDIGPQTLAYSAATGADLVELANQVQNVEQEKRRLQRKLDRSRRATNPGNYADDGTIRRGIALTHNKSKRYLRTQQELKYLQHQQAEIRKRQHTELANHLLSLGDCFYVEKMVWTSLTHRAKETEISEKTGKIKRKKRFGKSVANKAPATLIGILQRKSAALGIPGVIEVPTSVKASQYNHQSGTYTPKPLSQRWNNMPDGERIQRDLYSAFLLQHYDPQTNTFDANSLHQDYPQFVQYHRDAVLRLYAMPKTPSSMGIKRSLR

SEQ ID NO: 2267 - protein, 313 aa, unidentified
  REGION 1..313: note = Description of Unknown: uncultivated organism sequence
  REGION 1..313: note = Category: MG81 effectors
  REGION 1..313: note = Description: MG81-547 effector
MVANNEIKYYRVVRKWMKTKYKYYLQITFAGKPADKHREISTGRVGIDIGTQTIAIASDKSVKLLELADKVNKNHIKKCELQRKLDRSRRYTNPDNFNPDGTVRRGTKGHKLKWNKSKHYLEIAGKIRELERKNSDIRKYQHTCLANDILAMGNQIYIEPMNYKGLQKRAKETQVDEKGRYKKKKRFGKSLANKAPSMFVTILKTKAEQHGGEVYEVDIMSYRASQCDHTTGEYTKHGLNDRWRILGNGDKVQRDLYSAFLIKNSNKTHDEIDLDKCSKTYDSFKKLHDKEIENIRNEVKLRERKNISSYGIA

SEQ ID NO: 2268 - protein, 512 aa, unidentified
  REGION 1..512: note = Description of Unknown: uncultivated organism sequence
  REGION 1..512: note = Category: MG81 effectors
  REGION 1..512: note = Description: MG81-548 effector
MKKSNTDTCCLTLPLKLEKWQEDRLAKRFEIARQLYNTLVHAELKRLAQVKQTAEYRENERKIRALDWNDPGDQTKLKGLYKERRKSLKTAGFTDYSFTTDMGKYYKHFRDNIGSSVAVHGIAPQVWAAFDKLLFKKGGKKVHYKKPGEVNSVQGYSRTGKSGGTEIMFRGPYIEWKGLKLPLKLSPDNAYETDMLQRRVKLVRLVRRPGKRRDRWYAQLVLEGKPAIKADPVTGKAVHPIGSGPVGLDIGPQTLAYSAAGAAGLVELADRVQNIEQEKHCLQRKMDRSRRATNPDNYAEDGTIRRGVKLTHNKSKRYRRSQQELKYLQHRQAEIRKLQHIQLANHLLSLGDHFYVEKMEWSSLTHRAKKTVISEKTGKPRSKKRFGKSIANKAPAMLIEILRQKCKSLGLPNVVEINPADIKASQYNHLTGEYVKKSLSRRWNEMQDGEHLQRDLYSAFLLQHYDSMSKALDLDSLARDYPAFVQYHHREIERLHALLKTPASMGIRRSIA

SEQ ID NO: 2269 - protein, 429 aa, unidentified
  REGION 1..429: note = Description of Unknown: uncultivated organism sequence
  REGION 1..429: note = Category: MG81 effectors
  REGION 1..429: note = Description: MG81-549 effector
MLKDAGFSQYTFMDDMAGKKSLMQKHFESHINVQIAHKAAIDVWSSFEKFLFGTGQIVHYQKRGTLSSVASKSPKTGMFYYSDENIFKWSGGGTKPKGGIILCLRVASVKTNYEKEMVANNEIKYYRVVRKWMKTKYKYYLQITFAGKPADKHREISTGRVGIDIGTQTIAIASDKSVKLLELADKVNKNHIKKCELQRKLDRSRRYTNPDNFNPDGTVKRGTKGHKLKWNKSKHYLEVAGKIRELERKNADIRKYQHTCLANDILAMGNQIYIEPMNYKGLQKRAKETQVDEKGRYKKKKRFGKSLANKAPAMFVTILKTKAEQHGGEVYEVDIMSYRASQCDHTTGEYTKHGLNDRWRILGNGDKVQRDLYSAFLIKNSNKTHDEIDLDKCSKTYDSFKKLHDKEIENIRNEVILRKRRNISSYGIA

SEQ ID NO: 2270 - protein, 538 aa, unidentified
  REGION 1..538: note = Description of Unknown: uncultivated organism sequence
  REGION 1..538: note = Category: MG81 effectors
  REGION 1..538: note = Description: MG81-550 effector
MDNEEKEKDGATCCLTLPLKLEKWQSDHLEKRFEIARQLYNTLVHAELKKKCQVERMPEYQEIMKMIDAASNQKEKWALEKKRKAFLEENGFSRNAFKADMEKYYKHFNDNIGANVALHGITAQVWIAFDKVFVDNYKQKGKVHFKKPGELCSVQGYSQKKSGGKEIMFREDRIIWNQQGNRDRKKVKREFLLKLSPDNPYEAEMLKRHVKFVRILRKDGKTKPHWYAQLVLEGKPAVKRDPISSAPKHPVGHGVVGIDIGTRTLAYSADNKVDLIELADRVQNIEQEKRRLQRKMDRSRRAMNPENYNSDGTFKRGVKLTRNKSKRYRRIQHQLAMIQHHQADIRKQQHNELANYLLTLGDCFFVENMSYCDLVHRANKTEISEKTGRYKRKKRFGKSIANKAPAMLITMLKQKCQSRGLKGVKEVDTHVRASQYNHQTDTCIEKALENRWNVMPDGERIQRDLYSAFLLQHCKQGLPEYNRKELKKEFGEELYRVFDREALQRDYPQFVAYHHMTIQRLSELPHTIPSMGIRRIIS

SEQ ID NO: 2271 - protein, 522 aa, unidentified
  REGION 1..522: note = Description of Unknown: uncultivated organism sequence
  REGION 1..522: note = Category: MG81 effectors
  REGION 1..522: note = Description: MG81-551 effector
MKRSSTDTCCLTLPLKLEKWQSDRLEKRFEIGRQIYNTIVHAELKKLRKLERTQQYQEIEQKLENAKQEETKELWKKKRQLLDQNGLSENHFKADMKHYYPHFKDNIASSVAVHGIASQAWTAFEKVLLSKDGKMVHFKKKGELSSLRGYSQTGKSGGIEIIFRGSYVEWKGLKLPLKLSPDNDYETEMLSKRVKYVRILRQDGKTKPHWYAQLVLEGKPAVKRDPISGAPKHPIGRGVVGIDIGTRTLAYSADSKVDLIELADRVQNIEQEKLLLQRKLDRSRRATNPENYKPDGTIKKGVKLTRNKSKRYRRIQHQLAMIQHHQADIRKQQHNELANYLLTLGDCFFVEDMDYRALTRKAKKTEISEKTGRYKRKKRFGKSIANKAPAMLITMLKQKCQSRGLKGVKEVDTHVRASQYNHQTDTCIEKALENRWNVMPDGERIQRDLYSAFLLQHCKQGLPEYNRKELKKEFGEELYRVFDREALQRDYPQFVAYHHMTIQRLSELPHTIPSMGIRRIIS

SEQ ID NO: 2272 - protein, 505 aa, unidentified
  REGION 1..505: note = Description of Unknown: uncultivated organism sequence
  REGION 1..505: note = Category: MG81 effectors
  REGION 1..505: note = Description: MG81-552 effector
MAKATTDTCCLTLPLKLEKWQADRLEKRLEIARQIYNTLLHFELKKLRRLEESKEYIEIQNLLKETTDHAARKGLFKQLNELRRAAGFSEYTFKSDIKDYYKHFKDNIGSNVAVHGIAPQVWAAFDRLFYGNGKSVHFKQRGELTSLRGYSVAGKSGGVEIIFRETLIEWKGLKLPIKLDSKNAYENEMLQQRVKYCRIVKRPGKTASRWYVQLMLEGRPVLKVDRRTGELRHPVGQGAVGIDIGPQTIAYVADGEVALKELADQLGNIEREKRVLQRRLDRSRRATNPNNYAPDGTIKRGTKLTRNKSKRYLKSQRELSFLLHRQAELRKRQHNELANHLLSLGDRFYVEDMEWPALTHRAKETEISEKTGKYKRKKRFGKSVGNKAPAMLLGLLDIKLKSRGLEGVVKVPTSVRASQYNHLTDDYRKKELGERWNTMPDGRRIQRDLYSAFLLQHMNEARSDFDKTALSADYERFVTLHDQCIEELRRAPKTLASMGLVRRAR

SEQ ID NO: 2273 - protein, 511 aa, unidentified
  REGION 1..511: note = Description of Unknown: uncultivated organism sequence
  REGION 1..511: note = Category: MG81 effectors
  REGION 1..511: note = Description: MG81-553 effector
MKRSGTDTCCLTLPLRLEKWQEDRLAKRFEIARQIYNTMVRTELKKLRKMELSQTYRSIQEQIQALDWKNQNDKQQLRSLYNERDQLLKKNGFTEYGFKSDIKYYYKHFNDNIGSSVAVHGIAPQVWAAFEKMLFRKEGKKVHYKKRDDIHSLRGYSVTGKSGGAEIIFRETYIEWKGLKLPLKLSPHNAYETEMLSRRVKYVRLLRKPGKRKDRWYAQLSLEGKPAIKHDPASGELRHPVGRGAVGLDIGPQTLAYSACCAADLVELADRVQNIEQVKRLLLRKMDRSRRTTNPDNYTDDGTIRRGVKLTHNKSKRYQRTQRELRYLQHCQAEMRKRQHIELANHLLTLGDRFYVEDMAWPSLTRRAKETAISEKTGTIKRKKRFGKSIANKAPAALIGILEQKCYSLGLPGVVKVPTSLKASQYNHQSGEYTPKPLSQRWNNMPDGERIQRDLYSAFLLQHYDSQTGNFDPVLLQQDYPQFVQYHHCAIQRLSAMPRTLSSMGIQRSLR

SEQ ID NO: 2274 - protein, 505 aa, unidentified
  REGION 1..505: note = Description of Unknown: uncultivated organism sequence
  REGION 1..505: note = Category: MG81 effectors
  REGION 1..505: note = Description: MG81-554 effector
MARSTSDTCCLTLPLKIEKWQADRLEKRLEIARQIYNTLLRFELKKLKQMEAREDYLAIQEQLKETKNDAERKKLYKQIEKIRSETGFSEYSFKTDIKAFYKHFQENIGSSVAVHGIASQVWIAFDKLFHGSGKAVHFKKRGELTSVRGYSVAGKSGGIEIIFRNTFIEWKGLKLPIKLDPSNAYETEMLQKRVKYCRIIKKPGKNKNHWYVQLSLEGKPAVKYHQQTGEILHPVGHGNVGIDIGPQTIAYVADGEIELKELADQVNNIERKKRVLLRKMDRSRRATNPDNYNPDGTIKRGVKLTKNKSKRYIKCQRQLAHLMRQQAETRKRQHNELANHLLSLGDHFYIEDMEWPSLTHRSTKTEISEKTGKFKRKKRFGKSVGNKAPATLTTLLDLKLKSRGLEGVTKVNTMVRASQYNHITDDYQKKKLSDRWNNMPDGRKIQRDLYSAFLLQHMNETHDGFDKAALCRDYEQFTVLHDQCIKRLEQLKKTIASMGIVRKPS

SEQ ID NO: 2275 - protein, 536 aa, unidentified
  REGION 1..536: note = Description of Unknown: uncultivated organism sequence
  REGION 1..536: note = Category: MG81 effectors
  REGION 1..536: note = Description: MG81-555 effector
MDNEEKKEDGATCCLTLPLKLEKWQSDHLEKRFEIARQLYNTLVHAELKRIHRIERMPEYREIERQIEATTDKKEKWALKNQKKQFLRKNGINRNTFTTDMKRLYKHFNDNIGSNVAQHGIVSQVLTAFEKVYIENQSGEVHFKKPGDLRSVQGYSQKKSGGVEIMFREGKIIWNQQGNNDRKGVAREFPLKLSPDNSYEAEMLKKHVKFVRILRNEGKTKPHWYAQLVLEGKPAIKRDPASGAPKHPVGHGVVGIDIGTRTLAYSTDSKVDLIELADRVQNTEQEKMLLQRKLDRSRRATNPENYKPDGTIKKGVKLTRNKSKRYRKIQHQLAMLQHRQADIRKRQHNELANYLLTLGDCFFVEDMDYRALTRKAKKTEISEKTGRYKRKKRFGKSIANKAPSMLIALLDQKCKSLNLEGVKKVDTAVKASQYNHQTDECKAKELKERWNIMPDGERIQRDLYSAFLLQHCRRDLPEYNRKKLQEAFGNEVYRVFDREALQRDYPKFVEYHRETIQRLSALPKTIASMGIRRIIS

SEQ ID NO: 2276 - protein, 554 aa, unidentified
  REGION 1..554: note = Description of Unknown: uncultivated organism sequence
  REGION 1..554: note = Category: MG81 effectors
  REGION 1..554: note = Description: MG81-556 effector
MDNEEKEKDGATCCLTLPLKLEKWQSDHLEKRFEIARQLYNTLVHAELKRIHRIERMPEYREIERQIEATTDKKEKWALKNQKKQFLRKNGINRNTFTTDMKRFYKHFNDNIGSNVAQHGIVSQVLTAFEKVYIENQSGEVHFKKPGDLRSVQGYSQKESGGKEIMFRNGKIIWTQQENDDRKKSPKYQQRKKRQNYKGVKGIAREFPVVFSKNNPYEAEMLTKHVKFVRILRKDGKTKPHWYAQLVLEGKPAVKRDPISSAPKHPVGHGVVGIDIGTRTLAYSTDKEVNLLELADRVQNIEQEKRRLQRKMDRSRRAMNPENYNSDGTFKRGVKLTRNKSKRYRRIQHQLAMIQHHQADIRKQQHNELANYLLTLGDCFFVENMSYCDLVHRANKTEISEKTGRYKRKKRFGKSIANKAPAMLITMLKQKCQSRGLKGVKEVDTHVRASQYNHQTDTCIEKALENRWNIMPDGERIQRDLYSAFLLQHCKQGLPEYNRKELKKEFGEELYRVFDREALQRDYPQFVAYHHMTIQRLSELPHTIPSMGIRRIIS

SEQ ID NO: 2277 - protein, 512 aa, unidentified
  REGION 1..512: note = Description of Unknown: uncultivated organism sequence
  REGION 1..512: note = Category: MG81 effectors
  REGION 1..512: note = Description: MG81-557 effector
MPTKQKEDSNRCVLTLPLLTEPWQEHIIEKRFKIIEHLKNQLISIELRKLKNLQRTKAYKNLIKQIESVPKSERTVLYKERNKMLKDAGFSQYTFMDDMAGKKSLMQKHFESHINVQIAHKAAIDVWSSFEKFLFGTGQIVHYQKRGTLSSVASKSPKTGMFYYSDENIFKWSGGGTKPKGGIILCLRVASVKTNYEKEMVANNEIKYYRVVRKWMKTKYKYYLQITFAGKPADKHREISTGRVGIDIGTQTIAIASDKSVKLLELADKVNKNHIKKCELQRKLDRSRRYTNPDNFNPDGTVKRGTKAHKLKWNKSKHYIEIAGKIRELERKNADIRKYQHTCLANDILAMGNQIYIEPMNYKGLQKRAKETQVDEKGRYKKKKRFGKSLANKAPAMFVTIMKTKAEQHGGEVYEVDIMSYRASQCDHTTGEYTKHGLNDRWRILGNGDKVQRDLYSAFLIKNSNKTHDEIDLDKCSKTYDSFKKLHDKEIENIRNEVKLRERKNISSYGIA

SEQ ID NO: 2278 - protein, 526 aa, unidentified
  REGION 1..526: note = Description of Unknown: uncultivated organism sequence
  REGION 1..526: note = Category: MG81 effectors
  REGION 1..526: note = Description: MG81-558 effector
MAKKNNNDTDTCVLTLPLRVEKWQEDCLLKRFEAARRIYNSLLNFELKKLRQLERTVEYRQIQSVISSAYRSNTKDSPECKDAFKRREKLISANGISEYGFKSDVKFFYKHFDGLIGSSVAVHCIAVQLWAAFDKYLRGSGKEIHFKRLGDISSLKGYSVKGKSGGLEIIFRGQYVEWTRKKKKLLLPLKIDPDNEYEREMLSRRVKYVRIIKKPGKNRLRWYAQLTLEGKPALKYSAETGKPIHSVGKGDVGIDIGPQTVAYASDKEVALLELADRVTNIEHQKKKLQRKLDRSRRATNPDNYKPDGTIKRGVKLTRNKSKRYLKLQSKLAYIQHRQAEIRKLQHTCLANHMLTLGDRFFVEKMNWPGLAHRAKETSISEKTGRYKRKKRFGKSLANKAPAMFISILKRKCETLGLPGVVEVDTFRLKASQYNHLSDTYEKKSLSERWNYMPISDGSDSSKTKRIQRDLYSAFLLQHTIPQPCSFDKEALRIDYPSFVTMHDAEIHRLESLPKTITSMGVRRSHS

SEQ ID NO: 2279 - protein, 522 aa, unidentified
  REGION 1..522: note = Description of Unknown: uncultivated organism sequence
  REGION 1..522: note = Category: MG81 effectors
  REGION 1..522: note = Description: MG81-559 effector
MKRSSTDTCCLTLPLKLEKWQSDRLEKRFEIGRQIYNTIVHAELKKLRKLERTQQYQEIEQKLENAKQEETKELWKKKRQLLDQNGLSENHFKADMKYYYPHFKDNIASSVAVHGIASQAWTAFEKVLLSKDGKMVHFKKKGELSSLRGYSQAGKSGGIEIIFRGSYVEWKGLKLPLQLSPNNEYETEMLSKRVKYVRILRKDGKTKTHWYAQLALEGKPAVKRDSISGAPKHSVGHGVVGIDIGTRTLAYSTDSAVNLLELADRVQNIEQEKRRLQRKMDRSRRAMNPGNYKPDGSIKQGVKLTWNNSKRYKRIQHQYAMIQHHQADIRKQQHNELANYLLTLGDCFFVENMSYCDLAHRANKTEISEKTGRYKRKKRFGKSIANKTPAMLITMLKQKCQSRGLEGVKEVDTHVCASQYNHQTDTCIKKALENRWNIMPDGERIQRDLYSAFLLQHCRRDLPEYNGKELQKEFGEELYRVFDREALQRDYPQFVAYHHMTIQRLSELPHTIPSMGIRRIIS

SEQ ID NO: 2280 - protein, 526 aa, unidentified
  REGION 1..526: note = Description of Unknown: uncultivated organism sequence
  REGION 1..526: note = Category: MG81 effectors
  REGION 1..526: note = Description: MG81-560 effector
MNNEEKEKDGATCCLTLPLKLEKWQSDRLEKRFEIGRQIYNTIVHAELKKLRKLERTQQYQEIEQKLENAKQEETKELWKKKRQLLDQNGLSENHFKADMKHYYPHFKDNIASSVAVHGIASQAWTAFEKVLLSKDGKMVHFKKKGELSSLRGYSQAGKSGGIEIIFRGSYVEWKGLKLPLKLSPDNDYETEMLSKRVKYVRILRKDGKTKTHWYAQLALEGKPAVKRDSISGAPKHPVGHGVVGIDIGTRTLAYSTDKEVNLLELADRVQNIEQEKRRLQRKMDRSRRAMNPGNYKPDGSIKQGVKLTWNNSKRYKRIQHQYAMIQHHQADIRKQQHNELANYLLTLGDCFFVENMSYCDLVHRANKTEISEKTGRYKRKKRFGKSIANKAPAMLITMLKQKCQSRGLEGVKEVDTHVRASQYNHQTDTCIEKALENRWNVMPDGERIQRDLYSAFLLQHCKQGLPEYNRKELKKEFGEELYRVFDREALQRDYPQFVAYHHMTIQRLSELPHTIPSMGIRRIIS

SEQ ID NO: 2281 - protein, 341 aa, unidentified
  REGION 1..341: note = Description of Unknown: uncultivated organism sequence
  REGION 1..341: note = Category: MG81 effectors
  REGION 1..341: note = Description: MG81-561 effector
MLPLKIDPDNEYEREMLSRRVKYVRIIKKPGKNRLRWYAQLTLEGKPALKYSAETGKPIHSVGKGDVGIDIGPQTVAYASDKEVALLELADRVTNIEHQKKKLQRKLDRSRRATNPDNYKPDGTIKRGVKLTRNKSKRYLKLQSKLAYIQHRQAEIRKLQHTCLANHMLTLGDRFFVEKMNWPGLAHRAKETSISEKTGRYKRKKRFGKSLANKAPAMFISILKQKCETLGLPGVVEVDTFRLKASQYNHLSDTCEKKSLSERWNYMPISDGSDSSKTKRIQRDLYSAFLLQHTIPQPCSFDKEALRIDYPNFVTMHDAEIHRLESLPKTVTSMGVRRSHS

SEQ ID NO: 2282 - protein, 554 aa, unidentified
  REGION 1..554: note = Description of Unknown: uncultivated organism sequence
  REGION 1..554: note = Category: MG81 effectors
  REGION 1..554: note = Description: MG81-562 effector
MDNEEKKEDGATCCLTLPLKLEKWQSDHLEKRFEIARQLYNTLVHAELKRIHRIERMPEYREIERLIEATTDKKEKWALKNQKKQFLRKNGINRNTFTTDMKRLYKHFNDNIGSNVAQHGIVSQVLTAFEKVYIENQSGEVHFKKPGDLRSVQGYSQKESGGKEIMFRNGKIIWTQQENDDRKKSPKYQQRKKRQNYKGVKGIAREFPVVFSKNNPYEAEMLTKHVKFVRILRKDGKTKPHWYAQLVLEGKPAIKRDPASGAPKHPVGHGVVGIDIGTRTLAYSADSKVDLIELADRVQNIEQEKMLLQRKLDRSRRATNPENYKPDGSIKQGVKLTWNNSKRYKRIQHQYAMIQHHQADIRKQQHNELANYLLTLGDCFFVEDMDYRALTRKAKKTEISEKTGRYKRKKRFGKSIANKAPSMLIALLDQKCKSLNLEGVKKVDTAVKASQYNHQTDECKAKELKERWNIMPDGERIQRDLYSAFLLQHCRRDLPEYNRKKLQETFGNELYRVFDREALQRDYPKFVEYHRETIQRLSALPKTIASMGIRRSIS

SEQ ID NO: 2283 - protein, 484 aa, unidentified
  REGION 1..484: note = Description of Unknown: uncultivated organism sequence
  REGION 1..484: note = Category: MG81 effectors
  REGION 1..484: note = Description: MG81-563 effector
MAKNNNNNDTDTCVLTLPLRVEKWQEDCLLKRFEAARRIYNSLLNFELKKLRQLERTVEYRQIQSVISSAYRSNTKDSPECKDAFKRREKLISANGISENGFKSDVKFFYKHFDGLIGSSVAVHCIAVQLWAAFDKYLSGSGKEIHFKRLGDISSLKGYSVKGKSGGCEIIFRGQYVEWTRKKKKLLLPLKIDPDNEYEREMLSRRVKYVRIIKKPGKNRLRWYAQLTLEGKPALKYSAETGKPIHSVGKGNVGIDIGPQTVAYASDKEVALLELADRVTNIEHQKKKLQRKLDRSRRATNPDNYKPDGTIKRGVKLTRNKSKRYLKLQSKLAYIQHRQAEIRKLQHTCLANHMLTLGDCFFVEKMNWPGLAHRAKETSISEKTGRYKRKKRFGKSLANKAPAMFISILKRKCETLGLPGVVEVDTFRLRASQYNHLSDTYEKKSLSERWNYMPISDGSDSSKTKRIQRDLYSASTHDTAALFF

SEQ ID NO: 2284 - protein, 511 aa, unidentified
  REGION 1..511: note = Description of Unknown: uncultivated organism sequence
  REGION 1..511: note = Category: MG81 effectors
  REGION 1..511: note = Description: MG81-564 effector
MAKCSTDTCCLTLPLRLEKWHEDRLAKRFEIARQIYNTMVRAELKKLRAMEQSEPYKANQEKIQALDWKTQADKQALKALYKERDKLLQDGGFSERGFKSDIKNYYKHFNNNIGSNVAVHGIAPQVWAAFEKMLFKKEGKKVHFKKKGDIHSLRGYSVTRKSGGVEIIFRETYIEWKGLKLPLKLSPDNIYETQMLSYRVKYVRLLRKPGKRKDRWYAQLSLEGKPVIKYNPKTGEVRHPIGKGAVGLDIGPQTLAYSAATGADLVELANQVQNVEQEKRRLQRKLDRSRRATNPGNYADDGTIRRGIALTHNKSKRYLRTQQELKYLQHQQAEIRKRQHTELANHLLSLGDCFYVEKMVWTSLTHRAKETEISEKTGKIKRKKRFGKSVANKAPATLIGILQRKSAALGIPGVIEVPTSVKASQYNHQSGTYTPKPLSQRWNNMPDGERIQRDLYSAFLLQHYDPQTNTFDANSLHQDYPQFVQYHHDAVLRLYAMPKTPSSMGIKRSLR

SEQ ID NO: 2285 - protein, 497 aa, unidentified
  REGION 1..497: note = Description of Unknown: uncultivated organism sequence
  REGION 1..497: note = Category: MG81 effectors
  REGION 1..497: note = Description: MG81-565 effector
MAKNEQNCCVLTLPLLTEPWQEHIIETRFDIVEKLKNTLIGFELRKLKQLERTRAWKRLMKSIRECSDEKQKKSLFKERNTMLKDAGFTEFGFSGDVTKLAVHKHFVPHIGANIAQRSGQDVWRSFEKYLFSNGKAVHFHKRGSLDSIACKKPRGDGMTIDSDVFTWKGGRCDDCVILKIRIRRPKNAYEREMIQKEIRNMRVVRKWIKTRYKYYLQITYQGAPVSKHRPVGKNRVGIDIGTQTIAWSSPTEVRLAELAAGIRRNHAEKTALQRKMDRSRRTANPQNYNPDGTIKRGIKLRWVKTKHYLRMEGRVRELERKNADIRKNEHICLANHILSLGKEVYIEDMNFKGLQGRAKETKVDKNGRFARKKRFGKSLANRAPSMFVTILENKLKSAGGNLYKVNTRTFKASQYDHTADEYRKKTLGQRWNHLKNGDKIQRDLYSAFLLMNAAPTLEEPDKKLCKKTYPQFALLHDAEMERLNAEEKPHLSSMGIR

SEQ ID NO: 2286 - protein, 383 aa, unidentified
  REGION 1..383: note = Description of Unknown: uncultivated organism sequence
  REGION 1..383: note = Category: MG81 effectors
  REGION 1..383: note = Description: MG81-566 effector
MHFKKKGELSSLRGYSQTGKSGGIEIIFRGSYVEWKGLKLPLKLSPDNDYETEMLSKRVKYVRILRQDGKTKPHWYAQLVLEGKPAVKRDPISGAPKHPIGRGVVGIDIGTRTLAYSADSKVDLIELADRVQNIEQEKLLLQRKLDRSRRATNPENYKPDGTIKKGVKLTRNKSKRYRRIQHQLAMIQHHQADIRKQQHNELANYLLTLGDCFFVEDMDYRALTRKAKKTEISEKTGRYKRKKRFGKSIANKAPSMLIALLDQKCKSLNLEGVKKVDTAVKASQYNHQTDECKAKELKERWNIMPDGERIQRDLYSAFLLQHCRRDLPEYNRKKLQETFGNELYRVFDREALQRDYPKFVEYHRETIQRLSALPKTIASMGIS

SEQ ID NO: 2287 - protein, 1302 aa, unidentified
  REGION 1..1302: note = Description of Unknown: uncultivated organism sequence
  REGION 1..1302: note = Category: MG81 effectors
  REGION 1..1302: note = Description: MG81-567 effector
MKISKVDHIKTGVSELPIESGGMMYYYPGSNSKNVELRKHITQLCNRARNLYNVFVEPKAAKGKSLDKEICNTLNFYFKNYILKRVDDGNNDDGIYNNICTRNFNARPVMINFKEVNVTEINVQNVIDRCLRQSLRKKFAYNEKTFFIPDVIKKIGIVVFAHDKYLNEIKNISKDEAIALIKALREDYTKENMVETVAASIEKQNVPVQISKDGEQLVLSGSFNEKKAYIFEFMKKYASDEKGQDELLKHMRYLMLLYFYGKDTADDALNDDRFGAWNYGITLNEYKEILFSGEAADIRAELDNVPTNMKGKIRNLEDQLVNTIQKAVVAHYKNAIDGDELSDDDKKWVGFISDRVESKLLKICKSKGRDNGYKLTCKYLCEDLWDEWISFMAMKFVDMGKAVYHFAMEDRDAVTTGKTVSFGRVNSNYKNGLSSFDYERIKASDSFSRSLANYVLFAINNFDTSVRTPEERAKNKKEDILSDNSPVISDDAKKHILRFFGGASNYENTEVDTADTNTLFKECKCCLSAARNTSFHFVSGKNRFGDMPVINAIFKVEQSKAGKIYRKRMYSNNVPMFYAVKDIDDFMSSLYTSVRNDPAQIPSFNKVISRKEIYSFISEFILRDNREVLNNTEIAEIFKSSLYFVLKEIYYYDFINQKDIMDRFMKSINNLKAKDRKEQEAHNDFKKRIDQLKADGIGFGELCQEIMTEYNLQNNQKSKKPSAVKVKDKDGNVSVKEIKDDKTIYKHYVMLLYLGIRQAFYDYINEGKYAFLKKPNKRDLPDEEVFISGWTAKMYDSINLNNDVLMSWYITAHFLDQKQLNHLIGQFKTYVSYIDGIEKRAGATGNKQVKESEDNKKLYIDMITLLEFVKLYCGSVSNKIEDYFENADDYAKYIAGFVDFGGEDKNALQAFCNKKYKFEGDSVTLGKYFDAMNPILDRNVVLASMYGDRELLSAVADKVNEKEITKFYKLKEKAVEIMSENTSEPGELRKLREYQNLKNRIELVDVLSLTELTTALMSQLVGYTALRERDLMYMQLGYYYTKLFHTDSVEKDSYLRKLKGDCDIEDGAVLYQIAAMYSYDLPLYERDEDGISHAPKKPVSIGNKVKKFSEAYCRESKEAGNEYEIYKAGLNLFENISGKKDGRHDEYVDFRIYIDHLKYFAYHDMSILQMYSKLYGGFFSYSTKLRKSVSYVMPNILLSDFVNVKLGFDYKEEGMGDVTYRIPDIVIKEISSDYLSYKEFKSIVSSGNEVLKDGKRFVITGDFVNKNAKKPRKDNKPVSVPARSKSYLDAVSRLLAYRTDMK

SEQ ID NO: 2288 - protein, 530 aa, unidentified
  REGION 1..530: note = Description of Unknown: uncultivated organism sequence
  REGION 1..530: note = Category: MG81 effectors
  REGION 1..530: note = Description: MG81-568 effector
MILLANNNNNNNTDTCVLTLPLRVEKWQEDCLLKRFEAARRIYNSLLNFELKKLRQLERTVEYRQIQSVISSAYRSNTKDSLECKDAFKRRKKLTDENGISEYGFKSDVKFFYKHFDGLIGSSVAVHCIAVQLWAAFDKYLRGSGKEIHFKRLGDISSLKGYSVKGKSGGCEIIFRGQYVEWTRKKKKLLLPLKIDPDNEYEREMLSRRVKYVRIIKKPGKNRLRWYAQLTLEGKPALKYSAETGKPIHSVGKGDVGIDIGPQTVAYASDKEVALLELADRVTNIEHQKKKLQRKLDRSRRATNPDNYKPDGTIKRGVKLTRNKSKRYLKLQSKLAYIQHRQAEIRKLQHTCLANHMLTLGDRFFVEKMNWPGLAHRAKETSISEKTGRYKRKKRFGKSLANKAPAMFISILKRKCETLGLPGVVEVDTYNLKASQYNHLSDTYEKKSLSERWNYMPISDGSDSSKTKRIQRDLYSAFLLQHTIPQPCSFDKEALRIDYPNFVTMHDAEIHRLESLPKTVTSMGVRRSHS

SEQ ID NO: 2289 - protein, 538 aa, unidentified
  REGION 1..538: note = Description of Unknown: uncultivated organism sequence
  REGION 1..538: note = Category: MG81 effectors
  REGION 1..538: note = Description: MG81-569 effector
MNNEEKEKDGATCCLTLPLKLEKWQSDHLDKRFEIARQLYNTLVHAELKKKCQVERMPEYQEIMKMIDAASNQKEKWALEKKRKAFLEENGFSRNAFKADMEKYYKHFNDNIGANVALHGITAQVWIAFDKVFVDNYKQKGKVHFKKPGELCSVQGYSQKKSGGKEIMFREDRIIWNQQGNRDRKKVKREFLLKLSPDNPYEAEMLKRHVKFVRILRKDGKTKPHWYAQLVLEGKPAVKRDPASGAPKHPIGHGVVGIDIGTRTLAYSTDKEVNLLELADHVQNIEQEKRRLQRKMDRSRRATNPENYNPDGTFKRGVKLTRNKSKRYRRIQHQLAMIQHHQADIRKQQHNELANYLLTLGDCFFVENMSYCDLVHRANKTEISEKTGRYKRKKRFGKSIANKAPAMLITMLKQKCQSRGLEGVKEVDTHVRASQYNHQTDTCIEKALENRWNVMPDGERIQRDLYSAFLLQHCKQGLPEYNRKELKKEFGEELYRVFDREALQRDYPQFVAYHHMTIQRLSELPHTIPSMGIRRIIS

SEQ ID NO: 2290 - protein, 511 aa, unidentified
  REGION 1..511: note = Description of Unknown: uncultivated organism sequence
  REGION 1..511: note = Category: MG81 effectors
  REGION 1..511: note = Description: MG81-570 effector
MAKCSTDTCCLTLPLRLEKWQEDRLAKRFEIARQIYNTMVRAELKKLRAMEQSEPYKANQEKIQALDWKTQADKQALKALYKERDKLLRDGGFSEYGFKSDIKNYYKHFNNNIGSNVAFHGIAPQVWAAFEKMLFKKEGKKVHFKKKGDIHSLRGYSAAGKSGGVEIIFRETYIEWKGLKLPLKLSPNNIYETQMLSYRVKYVRLLRKPGKRKDRWYAQLSLEGKPVIKYNPKTGEVRHPIGKGAVGLDIGPQTLAYSAATGADLVELANQVQNVEQEKRRLQRKLDRSRRATNPGNYADDGTIRRGIALTHNKSKRYLRTQQELKYLQHQQAEIRKRQHTELANHLLSLGDCFYVEKMVWTSLTHRAKETEISEKTGKIKRKKRFGKSVANKAPATLIGILQRKSAALGIPGVIEVPTSVKASQYNHQSGTYTPKPLSQRWNNMPDGERIQRDLYSAFLLQHYDPQTNTFDANSLHQDYPQFVKYHHDAVLRLYAMPKTPSSMGIKRSLR

SEQ ID NO: 2291 - protein, 522 aa, unidentified
  REGION 1..522: note = Description of Unknown: uncultivated organism sequence
  REGION 1..522: note = Category: MG81 effectors
  REGION 1..522: note = Description: MG81-571 effector
MKRSSTDTCCLTLPLKLEKWQSDRLEKRFEIGRQIYNTVVRAELKKLQQVERTPQYREIEQKLKGAKQEEAKELWKKRTQLLSKSGFSEYGFKSDMKYYYQHFKENIGSSVAVHGIASQVWTAFEKVLFSKDGKMVHFKKKGELSSLRGYSQAGKSGGVEIIFRGSYVEWKGLKLPLKLSPDNDYETEMLSKRVKYVRILRQDGKTKPHWYAQLVLEGKPAIKRDPASGAPKHPVGHGAVGIDIGTRTLAYSADSKVDLIELADRVQNIEQEKLLLQRKLDRSRRATNPENYKPDGTIKKGVKLTRNKSKRYRKIQHQLAMLQHRQANIRKRQHNELANYLLTLGDCFFVEDMDYRALTRKAKKTEISEKTGRYKRKKRFGKSIANKAPSMLIALLDQKCKSLNLEGVKKVDTAVKASQYNHQTDECKAKELKERWNIMPDGERIQRDLYSAFLLQHCRRDLPEYNRKKLQETFGNEVYRVFDREALQRDYPKFVEYHRETIQRLSALPKTIASMGIRRIIS

SEQ ID NO: 2292 - protein, 538 aa, unidentified
  REGION 1..538: note = Description of Unknown: uncultivated organism sequence
  REGION 1..538: note = Category: MG81 effectors
  REGION 1..538: note = Description: MG81-572 effector
MDNEEKKEDGATCCLTLPLKLEKWQSDHLEKRFEIARQLYNTLVHAELKKKCQVERMPEYQEIMKMIDAASNQKEKWALEKKRKAFLEENGFSRNAFKADMEKYYKHFNDNIGANVALHGITAQVWIAFDKVFVDNYKQKGKVHFKKPGELCSVQGYSQKKSGGKEIMFREDRIIWNQQGNRDRKKVKREFLLKLSPDNPYEAEMLKRHVKFVRILRKDGKTKPHWYAQLVLEGKPAVKRDPASGAPKHPVGHGVVGIDIGTRTLAYSTDKEVNLLELADRVQNIEQEKRRLQRKMDRSRRATNPENYNPDGTFKRGVKLTRNKSKRYRRIQHQLAMIQHHQADIRKQQHNELANYLLTLGDCFFVENMSYCDLVHRANKTEISEKTGRYKRKKRFGKSIANKAPAMLITMLKQKCQSRGLEGVKEVDTHVRASQYNHQTDICIEKALENRWNVMPDGERIQRDLYSAFLLQHCKQGLPEYNRKELKKEFGEELYRVFDREALQRDYPQFVAYHHMTVQRLSELPHTIPSMGIRRIIS

SEQ ID NO: 2293 - protein, 595 aa, unidentified
  REGION 1..595: note = Description of Unknown: uncultivated organism sequence
  REGION 1..595: note = Category: MG81 effectors
  REGION 1..595: note = Description: MG81-573 effector
MVDLKKQLCSSASNSENQGVRFQTVVLYTKFVHKSVQLSPESSVFAVALFVRMMYNTKYQAKRGDPVGEKKNNNNNNTDTCVLTLPLRVEKWQEDCLLKRFEAARRIYNSLLNFELKKLRQLERTVEYRQIQSVISSAYRSNTKDSPECKAALKRREKLIDENGLTKNGFKNDVKFFYKHFDGLIGSSVAVHCIAVQLWAAFNKYLCGNGKEIHFKRLGDISSLKGYSVKGKSGGCEIIFRGQYVEWTRKKKKLLLPLKIDPDNEYEREMLSRRVKYVRIIKKPGKNRLRWYAQLTLEGKPALKYSAETGKPIHSVGKGDVGIDIGPQTVAYASDKEVALLELADRVTNIEHQKKKLQRKLDRSRRATNPDNYKPDGTIKRGVKLTRNKSKRYLKLQSKLAYIQHRQAEIRKLQHTCLANHMLTLGDRFFVEKMNWPGLAHRAKETSISEKTGRYKRKKRFGKSLANKAPAMFISILKQKCETLGLPGVVEVDTFRLKASQYNHLSDTCEKKSLSERWNYMPISDGSDSSKTKRIQRDLYSAFLLQHTIPQSCSFDKEALRIDYPNFVTMHDAEIHRLESLPKTITSMGVRRSHS

SEQ ID NO: 2294 - protein, 511 aa, unidentified
  REGION 1..511: note = Description of Unknown: uncultivated organism sequence
  REGION 1..511: note = Category: MG81 effectors
  REGION 1..511: note = Description: MG81-574 effector
MKKSNTDTCCLTLPLKLEKWQEDRLAKRFEIARQIYNTMVHAELKKLRNIENSQPYRQIQKQIEALNWKNQNDKARLKSLYNDRNKLLNTIGFSEYGFKADIKYYYKHFNDNIGSSVAVHGIAPQVWAAFEKMLFHKEGKKVHYKKKDDIHSLHGYSVTGKSGGVEIIFRKTYIEWKGLKLPLKRSPDNAYETEMLGRRVKYVRLLRKPGKRKDCWYAQLSLKGKPAIKRDPESGKRRHSIGRGAVGLDIGPQTLAYSACGAADLVELADQVQNIEQMKRRLQRKLDRSRRATNPDNYADNGTIRRGVKLTHNKSNRYRRTQRELRYLQHCQAEIRKRQHIELANHLLALGDCFYVEDMAWPSLTHRAKETAISEKTGRIKRKKRFGKSVANKAPATLIGILEQKCNSLGLPGVVKVPTSLRASQYNHQSGEYTSKPLSQRWNNMPDGERIQRDLYSAFLLQHYDSKAGNFDSALLQQDYPQFVQYHHRAIQRLSTVPKTLSSMGIQRSLR

SEQ ID NO: 2295 - protein, 511 aa, unidentified
  REGION 1..511: note = Description of Unknown: uncultivated organism sequence
  REGION 1..511: note = Category: MG81 effectors
  REGION 1..511: note = Description: MG81-575 effector
MGKSSTDTCCLTLPLKLEKWQEDRLAKRFEIARQIYNTMVRAELKKLERVKQLPEYRKNQKEIQALDWKNSADKQRLKELYGNQRKILQKQGFTEYGFKADSKDYYKHFIENIGSSVATHGIAPQVWNAFDKMLFQKDWKVVHFKRHGDVHSLKGGSVTHKSGGAEIMFRKTYIEWKGLKLPLKLSPNNAYEAEMLSYRVKYVRILRTRGKTKDRWYAQLSLEGKPAVKYDSNTGKPVHPVGRGAVGLDIGPQTLAYAAADEANLVELADQVQNIEQEKRRLQRKLDRSRRATNPDNYNENGTIRRGVKLTHNKSKRYCKLQKELSWIQHCQAETRKRQHIALANHLLSLGDCFYVEPMAWPSLTHRAKKTEVSEKTGKIKRKKRFGKSVANKAPASLIGILKLKCISLGLTGVVEVPMLLRASQYNHQSKDYEKKSLSQRWNNMPDGNRIQRDLYSAFLLQHYDSQSESFDQETLERDYPQFVRLHNQTIQRLSALPKTPSSMGIRRSVS

SEQ ID NO: 2296 - protein, 512 aa, unidentified
  REGION 1..512: note = Description of Unknown: uncultivated organism sequence
  REGION 1..512: note = Category: MG81 effectors
  REGION 1..512: note = Description: MG81-576 effector
MPTKQKEGGNRCVLTLPLLTEPWQEHIIEKRFKIIEHLKNQLISIELRKLKNLQRTKAYKNLIKQIESVPKSERTALYKERNKMLKDAGFSQYTFMDDMAGKKSLMQKHFESHINVQIAHKAAIDVWSAFEKFLFGSGQMIHYQKRGTLSSVASKSPKTGMFYYSDENIFKWSGGGTKPKGGIILCLRVASVKTNYEKEMVANNEIKYYRVVRKWMKTKYKYYLQITFAGKPADKHREISTGRVGIDIGTQTIAIASDKSVKLLELADKVNKNHIKKCELQRKLDRSRRYTNPDNFNPDGTVKRGTKGHKLKWNKSKHYLEVAGKIRELERKNADIRKYQHTCLANDILAMGNQIYIEPMNYKGLQKRAKETQVDEKGRYKKKKRFGKSLANKAPAMFVTILKTKAEQHGGEVYEVDIMSYRASQCDHTTGEYTKHGLNDRWRILGNGDKVQRDLYSAFLIKNSNKTHDEIDLDKCSKTYDSFKKLHDKEIENIRNEVILRKRRNISSYGIA

SEQ ID NO: 2297 - protein, 529 aa, unidentified
  REGION 1..529: note = Description of Unknown: uncultivated organism sequence
  REGION 1..529: note = Category: MG81 effectors
  REGION 1..529: note = Description: MG81-577 effector
MILLAKKNNNDTDTCVLTLPLRVEKWQEDCLLKRFEAARRIYNSLLNFELKKLRQLERTVEYRQIQSVISSAYRSNTKDSPECKAALKRREKLIDENGLTKNGFKNDVKFFYKHFDGLIGSSVAVHCIAVQLWAAFNKYLCGNGKEIHFKRLGDISSLKGYSVKGKSGGCEIIFRGQYVEWTRKKKKLLLPLKIDPDNEYEREMLSRRVKYVRIIKKPGKNRLRWYAQLTLEGKPALKYSAETGKPIHSVGKGDVGIDIGPQTVAYASDKEVALLELADRVTNIEHQKKKLQRKLDRSRRATNPDNYKPDGTIKRGVKLTRNKSKRYLKLQSKLAYIQHRQAEIRKLQHTCLANHMLTLGDRFFVEKMNWPGLAHRAKETSISEKTGRYKRKKRFGKSLANKAPAMFISILKQKCETLGLPGVVEVDTFRLKASQYNHLSDTCEKKSLSERWNYMPISDGSDSSKTKRIQRDLYSAFLLQHTIPQSCSFDKEALRIDYPNFVTMHDAEIHRLESLPKTITSMGVRRSHS

SEQ ID NO: 2298 - protein, 511 aa, unidentified
  REGION 1..511: note = Description of Unknown: uncultivated organism sequence
  REGION 1..511: note = Category: MG81 effectors
  REGION 1..511: note = Description: MG81-578 effector
MKKSNTDTCCLTLPLKLEKWQEDRLAKRFEIARQIYNTMVHAELKKLRNIENSQPYRQIQKQIEALNWKNQNDKARLKSLYNDRNKLLNTIGFSEYGFKADIKYYYKHFNDNIGSSVAVHGIAPQVWAAFEKMLFHKEGKKVHYKKKDDIHSLHGYSVTGKSGGVEIIFRKTYIEWKGLKLPLKRSPDNAYETEMLGRRVKYVRLLRKPGKRKDCWYAQLSLKGKPAIKRDPESGERRHSIGRGAVGLDIGPQTLAYSACGAADLVELADQVQNIEQMKRRLQRKLDRSRRATNPDNYADNGTIRRGVKLTHNKSNRYRRTQRELRYLQHCQAEIRKRQHIELANHLLALGDCFYVEDMAWPSLTHRAKETAISEKTGRIKRKKRFGKSVANKAPATLIGILEQKCNSLGLPGVVKVPTSLRASQYNHQSGEYTSKPLSQRWNNMPDGERIQRDLYSAFLLQHYDSKAGNFDSALLQQDYPQFVQYHHRAIQRLSTVPKTLSSMGIQRSLR

SEQ ID NO: 2299 - protein, 511 aa, unidentified
  REGION 1..511: note = Description of Unknown: uncultivated organism sequence
  REGION 1..511: note = Category: MG81 effectors
  REGION 1..511: note = Description: MG81-579 effector
MAKKSATDTCCLTLPLLTEKWQSDRLEKRFEIARQIYNTLLNYELKKLRRLEQSAEYTAIQAAIQKSYEAGKTDKAELKSLFQEREKLRRAAGFSEYDFKTDIKTFYKHFNDNIGSSVAVHGIAPQVWQGFDQLFYGNGKAVHFKRRGDIKSLRGYSVAGKSGGVEIIFRGSYIEWKGLKLSLKLGKNNAYEAEMLQKRVKYCRIVKKAGKHKTHWYVQLMLEGTPAQKCDVNTGELRHPVGRGAVGIDIGPQTIAYAAEAEVALKELADGVKNIEQEKRLLQRKLDRSRRSTNPDNFAADGTIKRGVKLNWHKSKRYIRLQHELAVLQRQQAEVRKRQHTELANHLLSLGDRFYVEDMEWPALTHRAKETAISEKTGRYKRKKRFGKSVANKAPAMLIAILDQKLRSRGLDGVIKVKTSVRASQFNHMTGEYQKKSLAQRWNDMPDGRRIQRDLYSAFLLQHMNAAQDGFDVAALNRDYENFAVLHKRVIEELRTASKTLSSMGITRSVS

SEQ ID NO: 2300 - protein, 587 aa, unidentified
  REGION 1..587: note = Description of Unknown: uncultivated organism sequence
  REGION 1..587: note = Category: MG81 effectors
  REGION 1..587: note = Description: MG81-580 effector
MRNGNKPTDGLLWYPRRAVFDTSHQKRPCALRGGTGEYDVGWARSRWRTALTTGTGACHAPVGGGERTDSPTEVGRHPDAFEVTLPRLFAFGFGCGGFVLGEAFMADHRKIYNTMVRAELKKLDRVKQLPEYRKNQKEIQALDWKNSADKQRLKEQYGNQRKILQKQGFTEYGFKADSKDYYKHFIENIGSSVATHGIAPQVWNAFDKMLFQKDGKVVHFKRYGDVHSLKGGSVAQKSGGAEIMFRKTYIEWKGLKLPLKLSPNNAYEAEMLSYRVKYVRILRTRGKTKDRWYAQLSLEGKPAVKYDSNTGKPVHPVGRGAVGLDIGPQTLAYAAANEANLVELADQVQNIEQEKRRLQRKLDRSRRATNPDNYNENGTIRKGVKLTHNKSKRYCKLQKELSWIQHYQAETRKRQHIALANHLLSLGDCFYVEPMAWPSLTHRAKKTEISEKTGKIKRKKRFGKSVANKAPASLIGILKLKCISLGLTGVVEVPMLLKASQYNHQSKDYAPKSLSQRWNDMPDGNRIQRDLYSAFLLQHHDSQSESFDQETLERDYPQFVRLHNQTIQRLSALPKTPSSMGIRRSVS

SEQ ID NO: 2301 - protein, 525 aa, unidentified
  REGION 1..525: note = Description of Unknown: uncultivated organism sequence
  REGION 1..525: note = Category: MG81 effectors
  REGION 1..525: note = Description: MG81-581 effector
MANNNNNTDTCVLTLPLRVEKWQEDCLLKRFEAARRIYNSLLNFELKKLRQLERTVEYRQIQSVISSAYRSNTKDSPECKAALKRREKLIDENGLTKNGFKNDVKFFYKHFDGLIGSNVAVHCIAVQLWAAFDKYLRGSGKEIHFKRLGDISSLKGYSVKGKSGGREIIFRGQYIEWTRKKKKLLLPLKIDPDNEYEREMLSRRVKYVRIIKKPGKNRLRWYAQLTLEGKPALKYSAGTGKPIHSVGKGNVGIDIGPQTVAYASDKEVALLELADRVTNIEHQKKKLQRKLDRSRRATNPDNYKPDGTIKRGVKLTRNKSKRYLKLQSKLAYIQHRQAEIRKLQHTCLANHMLTLGDRFFVEKMNWPGLAHRAKETSISEKTGRYKRKKRFGKSLANKAPAMFISILKRKCETLGLPGVVEVDTYSLKASQYNHLSDTYEKKSLSERWNYMPISDGSDSSKTKRIQRDLYSAFLLQHTIPQPCSFDKEALRIDYPNFVTMHDAEIHRLESLPKTVTSMGVRRSHS

SEQ ID NO: 2302 - protein, 499 aa, unidentified
  REGION 1..499: note = Description of Unknown: uncultivated organism sequence
  REGION 1..499: note = Category: MG81 effectors
  REGION 1..499: note = Description: MG81-582 effector
MLTAYNLEVNRLRDDYWKRRHDEDISDADIKKELNALAKEDKRYKQLNYGAFGTQYLTPEKKRHEQAEHRIENGEDPSVVWNQETERSANPWLHTANQRVLVSGLQNASDAWDNFWASRTGKRAGRLVGTPRFKKKGVSRDSFTVPAPEKMGAYGTAYLRGEPAYKQGRRKITDYRHVRLSYLGTIRTFNSTKPLVKAVVAGAKIRSYTVSRNADRWYVSFLVKFSEPIRRSATKRARAAGSVGVDLGVKYLASLSDSEAPQRFPNLKFVEGLPSLENPRWSEASSRRLHKLQRALARSQKGSNRRSRLVKQIARLHHMTALRRESNLHQLTKKLATEYTLVGFEDLNVSGMTASAKGTVENPGKNVAQKSGLNRVVLDAAFGVFRNQLEYKAVWYGSAFEKVDRYFASSQTCSECGRKAKTKLTLRDRVFDCAYCGNMMDRDLNAAVNICREAQRLFDEKLASEDRESLNGRGSRGALRGAETVEASRPPASHRRGSP

SEQ ID NO: 2303 - protein, 538 aa, unidentified
  REGION 1..538: note = Description of Unknown: uncultivated organism sequence
  REGION 1..538: note = Category: MG81 effectors
  REGION 1..538: note = Description: MG81-583 effector
MNNEEKEKDGATCCLTLPLKLEKWQSDHLEKRFEIARQLYNTLVHAELKKKCQVERMPEYQEIMKMIDAASNQKEKWALEKKRKAFLEENGFSRNAFKADMEKYYKHFNDNIGANVALHGITAQVWIAFDKVFVDNYKQKGKVHFKKPGELCSVQGYSQKKSGGKEIMFREDRIIWNQQGNRDRKKVKREFLLKLSPDNPYEAEMLKRHVKFVRILRKDGKTKPHWYAQLVLEGKPAVKRDSISGAPKHPVGHGVVGIDIGTRTLAYSTDKEVNLLELADRVQNIEQEKRRLQRKMDRSRRAMNPGNYKPDGSIKQGVKLTWNNSKRYKRIQHQYAMIQHHQADIRKQQHNELANYLLTLGDCFFVENMSYCDLAHRANKTEISEKTGRYKRKKRFGKSIANKAPAMLITMLKQKCQSRGLEGVKEVDTHVCASQYNHQTDTCIKKALENRWNIMPDGERIQRDLYSAFLLQHCRRDLPEYNRKELQKEFGEELYRVFDREALQRDYPQFVAYHHMTIQRLSELPHTIPSMGIRRIIS

SEQ ID NO: 2304 - protein, 511 aa, unidentified
  REGION 1..511: note = Description of Unknown: uncultivated organism sequence
  REGION 1..511: note = Category: MG81 effectors
  REGION 1..511: note = Description: MG81-584 effector
MKKSNTDTCCLTLPLKLEKWQEDRLAKRFEIARQIYNTMVHAELKKLRNIENSQPYRQIQKQIEALNWKNQNDKARLKSLYNDRNKLLNTIGFSEYGFKADIKYYYKHFNDNIGSSVAVHGIAPQVWAAFEKMLFHKEGKKVHYKKKDDIHSLHGYSVTGKSGGVEIIFRKTYIEWKGLKLPLKRSPDNAYETEMLGRRVKYVRLLRKPGKRKDCWYAQLSLEGKPAIKRDPESGERRHSIGRGAVGLDIGPQTLAYSACGAADLVELADQVQNIEQMKRRLQRKLDRSRRATNPDNYADNGTIRRGVKLTHNKSNRYRRTQRELRYLQHCQAEIRKRQHIELANHLLALGDCFYVEDMAWPSLTHRAKETAISEKTGRIKRKKRFGKSVANKAPATLIGILEQKCNSLGLHGVMKVPTSLRASQYNHQSGEYTSKPLSQRWNNMPDGERIQRDLYSAFLLQHYDPKAGNFDSALLQQEYPQFVQYHHRAIQRLSAVPKTLSSMGIQRSLR

SEQ ID NO: 2305 - protein, 538 aa, unidentified
  REGION 1..538: note = Description of Unknown: uncultivated organism sequence
  REGION 1..538: note = Category: MG81 effectors
  REGION 1..538: note = Description: MG81-585 effector
MNNEEKEKDGATCCLTLPLKLEKWQSDHLEKRFEIARQLYNTLVHAELKKKCQVERMPEYQEIMKMIDAASNQKEKWALEKKRKAFLEENGFNRNAFKADMEKYYKHFNDNIGANVALHGITAQVWIAFDKVFVDNYKQKGKVHFKKPGELCSVQGYSQKKSGGKEIMFREDRIIWNQQGNRDRKKVKREFLLKLSPDNPYEAEMLKRHVKFVRILRKDGKTKPHWYAQLVLEGKPAVKRDSASGAPKHPVGHGVVGIDIGTRTLAYSTDKEVNLLELADRVQNIEQEKRRLQRKMDRSRRATNPENYNPDGTFKRGVKLTRNKSKRYRRIQHQLAMIQHHQADIRKQQHNELANYLLTLGDCFFVENMSYCDLVHRANKTEISEKTGRYKRKKRFGKSIANKAPAMLITMLKQKCQSRGLEGVKEVDTHVRASQYNHQTDICIEKALENRWNVMPDGERIQRDLYSAFLLQHCKQGLPEYNRKELKKEFGEELYRVFDREALQRDYPQFVAYHHMTIQRLSELPHTIPSMGIRRIIS

SEQ ID NO: 2306 - protein, 522 aa, unidentified
  REGION 1..522: note = Description of Unknown: uncultivated organism sequence
  REGION 1..522: note = Category: MG81 effectors
  REGION 1..522: note = Description: MG81-586 effector
MKRSSTDTCCLTLPLKLEKWQSDRLEKRFEIGRQIYNTIVHAELKKLRKLERTQQYQEIEQKLENAKQEETKELWKKKRQLLDQNGLSEDHFKADMKYYYPHFKDNIASNVAVHGIASQAWTAFEKVLFSKDGKMVHFKKKGELSSLRGYSRAGKSGGVEIIFRGSYVEWKGLKLPLKLSPDNDYETEMLSKRVKYVRILRKDGKTKTHWYAQLALEGKPAVKRDSISGAPKHPVGHGVVGIDIGTRTLAYSTDSEVNLLELADRVQNIEQEKRRLQRKMDRSRRAMNPGNYKPDGSIKQGVKLTWNNSKRYKRIQHQYAMIQHHQADIRKQQHNELANYLLTLGDCFFVEDMSYCDLVHRANKTEISEKTGRYKRKKRFGKSIANKAPAMLITMLKQKCQSRGLEGVKEVDTHVRASQYNHQTDTCIEKALENRWNVMPDGERIQRDLYSAFLLQHCKQGLPEYNRKELKKEFGEELYRVFDREALQRDYPQFVAYHHMTIQRLSELPHTIPSMGIRRIIS

SEQ ID NO: 2307 - protein, 508 aa, unidentified
  REGION 1..508: note = Description of Unknown: uncultivated organism sequence
  REGION 1..508: note = Category: MG81 effectors
  REGION 1..508: note = Description: MG81-587 effector
MADKECCVLTLPLQTENWQEHIIEKRFAIMEHLKNQLIAKELRRLKNLERTKEYRILIDEINNTPKEKRKALFSKRRKLLKDSGFNRNKFKDDMAVMQKHFEEHIATQIAQEAASDVWRSFDKYLFNNGKYIHFTRKGSLSSINCQKINNGMKYIDGYFIWTCGICSGKRDRRIILKIKVTPPKNEYEKEMLSKKIKYLRIVKKWVKTRYKYYLQFALEGKPVKKDRIVNKGNVGIDIGTQTVAISSADSVKLLELADKIDKNHTKKKILQRKMDRSRRYTNPQNYNEDGTIKKPPKGQRYCWYKSKKYIQLAGKVRELERKNADIRKYQHTCLANWILSLGDTVYVEQMNFSGLQRRAKETKIDKNGKYAKKKRYGKSLANKAPSMFLTILESKLNQYGGQLNKINTYEFKASQYDHTDDTFTKHNRSERWHILSNGDKNQRDLYSAFLIMNSDISLEHCNREKCNETYSNFKVLQDKEIERLYSDIRKGNCKNISSFGFQRNAKAM

SEQ ID NO: 2308 - protein, 534 aa, unidentified
  REGION 1..534: note = Description of Unknown: uncultivated organism sequence
  REGION 1..534: note = Category: MG81 effectors
  REGION 1..534: note = Description: MG81-588 effector
MGWKSKGRGGTLVKRSSTDTCCLTLPLKLEKWQSDRLEKRFEIGRQIYNTIVHAELKKLRKLERTQQYQEIEQKLENAKQEETKELWKKKRQLLDQNGLSENHFKADMKYYYPHFKDNIASSVAVHGIASQAWTAFEKVLLSKDGKMVHFKKKGELSSLRGYSQAGKSGGIEIIFRGSYVEWKGLKLPLKLSPDNDYETEMLSKRVKYVRILRKDGKTKTHWYAQLALEGKPAVKRDSISGAPKHPVGHGVVGIDIGTRTLAYSTDKEVNLLELADRVQNIEQEKRRLQRKMDRSRRAMNPGNYKPDGSIKQGVKLTWNNSKRYKRIQHQYAMIQHHQADIRKQQHNELANYLLTLGDCFFVENMSYCDLAHRANKTEISEKTGRYKRKKRFGKSIANKAPAMLITMLKQKCQSRGLEGVKEVDTHVCASQYNHQTDTCIKKALENRWNIMPDGERIQRDLYSAFLLQHCRRDLPEYNRKELQKEFGEELYRVFDREALQRDYPQFVAYHHMTIQRLSELPHTIPSMGIRRIIS

SEQ ID NO: 2309 - protein, 521 aa, unidentified
  REGION 1..521: note = Description of Unknown: uncultivated organism sequence
  REGION 1..521: note = Category: MG81 effectors
  REGION 1..521: note = Description: MG81-589 effector
MLILGRRMYMPTKQKEDSNRCVLTLPLLTEPWQEHIIEKRFKIIEHLKNQLISIELRKLKKLQRTKAYKNLIKQIESVPKSERTALYKERNKMLKDAGFSQYTFMDDMAGKKSLMQKHFESHINVQIAHKAAIDVWSSFEKFLFGTGQIVHYQKRGTLSSVASKSPKTGMFYYPDENIFKWSGGGTKPKGGIILCLRVASVKTNYEKEMVANNEIKYYRVVRKWMKTKYKYYLQITFAGKPADKHREISTGRVGIDIGTQTIAIASDKSVKLLELADKVNKNHIKKCELQRKLDRSRRYTNPDNFNPDGTVKRGTKGHKLKWNKSKHYLEIAGKIRELERKNADIRKYQHTCLANDILAMGNQIYIEPMNYKGLQKRAKETQVDEKGRYKKKKRFGKSLANKAPAMFVTILKTKAEQHGGEVYEVDIMSYRASQCDHTTGEYTKHGLNDRWRILGNGDKVQRDLYSAFLIKNSNKTHDEIDLDKCSKTYDSFKKLHDKEIENIRNEVILRKRRNISSYGIA

SEQ ID NO: 2310 - protein, 512 aa, unidentified
  REGION 1..512: note = Description of Unknown: uncultivated organism sequence
  REGION 1..512: note = Category: MG81 effectors
  REGION 1..512: note = Description: MG81-590 effector
MPTKQKEGGNRCVLTLPLLTEPWQEHIIEKRFKIIEHLKNQLISIELRKLKNLQRTKAYKNLIKQIESVPKSERTVLYKERNKMLKDAGFSQYTFMDDMAGKKSLMQKHFESHINVQIAHKAAIDVWSSFEKFLFGTGQIVHYQKRGTLSSVASKSPKTGMFYYSDENIFKWSGGGTKPKGGIILCLRVASVKTNYEKEMVANNEIKYYRVVRKWMKTKYKYYLQITFAGKPADKHREISTDRVGIDIGTQTIAVASDKSVKLLELADKVNKNHIKKCELQRKLDRSRRYTNPDNFNPDGTVKRGTKGHKLKWNKSKHYLEIAGKIRELERKNADIRKYQHTCLANDILAMGNQIYIEPMNYKGLQKRAKETQVDEKGRYKKKKRFGKSLANKAPAMFVTILKTKAEQHGGEVYEVDIMSYRASQCDHTTGEYTKHGLNDRWRILGNGDKVQRDLYSAFLIKNSNKTHDEIDLDKCSKTYDNFKKLHDKEIENIRNEVILRKRRNISSYGIA

SEQ ID NO: 2311 - protein, 511 aa, unidentified
  REGION 1..511: note = Description of Unknown: uncultivated organism sequence
  REGION 1..511: note = Category: MG81 effectors
  REGION 1..511: note = Description: MG81-591 effector
MKKSNTDTCCLTLPLKLEKWQEDRLAKRFEIARQIYNTMVHAELKKLRNIENSQPYRQIQKQIEALNWKNQNDKARLKSLYNDRNKLLNTIGFSEYGFKADIKYYYKHFNDNIGSSVAVHGIAPQVWAAFEKMLFHKEGKKVHYKKKDDIHSLHGYSVTGKSGGVEIIFRKTYIEWKGLKLPLKFSPDNAYETEMLGRRVKYVRLLRKPGKRKDCWYAQLSLEGKPAIKRDPESGKRRHSIGRGAVGLDIGPQTLAYSACGAADLVELADQVQNIEQMKRRLQRKLDRSRRATNPDNYADNGTIRRGVKLTHNKSNRYRRTQRELRYLQHCQAEIRKRQHIELANHLLALGDCFYVEDMAWPSLTHRAKETAISEKTGRIKRKKRFGKSVANKAPATLIGILEQKCNSLGLPGVMKVPTSLRASQYNHQSGEYTSKPLSQRWNNMPDGERIQRDLYSAFLLQHYDPKAGNFDSALLQQDYPQFVQYHHRAIQRLSTVPKTLSSMGIQRSLR

SEQ ID NO: 2312 - protein, 359 aa, unidentified
  REGION 1..359: note = Description of Unknown: uncultivated organism sequence
  REGION 1..359: note = Category: MG81 effectors
  REGION 1..359: note = Description: MG81-592 effector
MKATKTLQLRIKDKHAKVLVAMAREVNQAWNHVNEVSAKAARPFHGKPKYLSGYDLQKCTAGYSKCDGVSVGSGTVQLVCAEYATRRKQFKKTRLNWRISNPKSSKYSLGWIPFKGGHAKYKAGQIHFAGQKFSLWDSYGLSKYELRGGSFTEDSRGRWYFNVAVEVECQPSPATASVGIDLGLKDCATDSNGKQLHGRWYRNHELALAKAQRANKKKRVKTIHAKIKNQRKDDMHQFSTQLVKNNAAIFVGDVASAKLVKTKMAKSTLDAGWSSLKTMLEYKSHQAGIVFEVVSESYSTQTCSCCGAIPASSPKGRAGLRIREWTCSDCGAEHDRDVNAARNILAAGHRRLAEGIPVL

SEQ ID NO: 2313 - protein, 505 aa, unidentified
  REGION 1..505: note = Description of Unknown: uncultivated organism sequence
  REGION 1..505: note = Category: MG81 effectors
  REGION 1..505: note = Description: MG81-593 effector
MAKATSDTCCLTLPLKLEKWQEDRLAKRLKIARQIYNTLLHFELKKLRRLEASEEYLAIQEKLKEVTDKTERNKLYKQLDKLRRDTGFTEYAFKTDIKEFYKHFSDNIGSAVAVHGIAAQVWVAFDKLFYGSGKAVHFKRHGELNSLRGYSVAGKSGGVEIMFRETYIEWKGLKLPIKLDPNNAYEQEMLQYRIKYCRIIRKPEKSKNHWYVQLSLEGKPVIKCNKETGEILHPVGSGAVGIDIGPQTIAYASESEVALKELADQVNNIEQEKRILQRKLDRSRRATNPDNYNPDGTIKRGVKLTRNKSKRYQKCQRELADIQHRQADIRKRQHNELANHLLSLGNRFYVEDMEWPALTHRAKKTEVSEKTGRFKRKKRFGKSIANKAPATLTNLLDLKLKSRGLGGVVHVDTKVRASQYNHLTDDYHKKELNERWNAMPDGRRIQRDLYSAFLLQHMNEKLDGFDKEALTRDYEQFAALHDDCIDALKKAPKTLASMGIVRRTS

SEQ ID NO: 2314 - protein, 1302 aa, unidentified
  REGION 1..1302: note = Description of Unknown: uncultivated organism sequence
  REGION 1..1302: note = Category: MG81 effectors
  REGION 1..1302: note = Description: MG81-594 effector
MKISKVNHVKTGTRIKENNGEGVLYANPSKQANAVKDLSKHIQDVNKKAQGLYSPLNPVKALINPKMPKEKKDEINGSYKAFKSVVNDIIKENEAGIPDSASVIRALYEKAKKTDLKVSDASNLSSKMIDKCLRKSLESKSEIAKEILRAIISSDKSTVNSLNAEEVKAFFELVHKDYYKIEQLKAIEKSIENKDVKVQVKTGNDGEKHLVLSNADNAKKHFYFDFVKEFAAKDKIEREEMIIRFRQLIILFYSGVESYKLSIGSDVGAWTFGSSLPEVTDNFDDEIASLISEYNNNIANKENIQKSIDLKSNQMKNYKFNSPEYKKLDDQISKLKDDQGDCKYAISDAKRKIKVLVEKLICIKYRDAINAEGITDSDVFWIGYIQQVAQKQFSKKDAYNNYRISTKYLYEVTFNEWISFMASKYIDLGKAVYHFAMPDFSDIKSGKEIYAGKVQPIFENGITSFDYERIKAKETLARDFSVYATYASGIFSNAVTDSDYRLKDEKEDALFYKQEDWEQALLPDAKKKLLMYFGGQSKWEDSEIENVSDLEMTKAFQDMINVIRNSNYHYAGSVLEPNEQSTNIAKMLFDKEFSWLGKIIREKYLSNNVPVYYNVEDINKMMTYLYQGESKREAQIPSFGNVLKKKEMPGFVTKYIPGNLLAKFDSAGVDKFRASLYFVLKEAYYYGFLNETNLKGRFIKALNDSEKNAKNPEAIENFKARINDMDDSCSFGEICQMLMTDYNLQNQSEYKVKSQIEQNQDEKDNKGHKYSHFKMLLYITLQKAFIDYIVEKQDIYGYIKAPIFKSNYFDGDEPQKFVESWEANLFGDVKITTETDPYFLAWYVLSHMLPAKQVNQLQGGIKSYIQFVTDINRREKSVIGTEKDDSLVNSIAYYQNILKVLEFVMCFVGKTSNVLSDYFADEDDYALHLYSYVGFASKKEEKTNSTLSGFCSKSITKAGKELTDRIGIYHDGTNPIVNNNVVKALMYGNENVLSEAVTRVSADLINGEITKYYEVKKKLEKVFEKGECSNEEEQKDLREFQNLKNRIELQDISIFTEIINDYMSELVNMAYLRERDLMYYQLGFNYIRLEYGNVEDKYKELQGDNINIKSGALLYQIVALYTHELPIVYKDKDSYKYTNNGKIGRFVKSYCEEEFSDLDNAYLKGLELFEDINLHDDLHLFRNEIDHLKYFIRADKSILQMYSRIYNGFFSYDLKLKKSVSYIFANILAKYFVIADTEMKSSVENGKRVAMLSIKGLESDVFNYKGKKLDKEGKERDSKYTLPVRSDEFLKEIKKLLNYKSI

SEQ ID NO: 2315 - protein, 512 aa, unidentified
  REGION 1..512: note = Description of Unknown: uncultivated organism sequence
  REGION 1..512: note = Category: MG81 effectors
  REGION 1..512: note = Description: MG81-595 effector
MKKSSTDTCCLTLPLKLEKWQEDRLAKRFEIARQLYNTLVHAELKRLVQIKRTAEYLENEQKIRALDRNNPADRAKLQELYKEQRKSLKTAGFTDYSFTTDMGKYYKHFRDNIGSSVAVHGIAPQVWAAFDKVLFKKGGKKVHYKRPGEVNSVQGYSRTGKSGGREIMFRGAYIEWKGLKLPLKLSPDNAYETDMLQRRLKLVRLVRRPGKRRDRWYAQLVLEGKPAIKADPVTGKAVHPIGSGPVGLDIGPQTLAYSAAGVAGLVELADRVQNIEQEKRCLQRKMDRSRRAANPDNYAEDGTIRRGVKLTHNKSKRYRRSQQELKYLQHRQAEIRKLQHIQLANHLLSLGDHFYVEKMEWSSLTHRAKKTVISEKTGKPRSKKRFGKSIANKTPAMLIEILRQKCKSLGLSDVVEINPADIKASQYNHLTGEYVKKSLSRRWNDMQDGEHLQRDLYSAFLLQHYDSMSKALDLDSLARDYPAFVQYHHREIERLHALPKTPSSMGIRRSIA

SEQ ID NO: 2316 - protein, 355 aa, unidentified
  REGION 1..355: note = Description of Unknown: uncultivated organism sequence
  REGION 1..355: note = Category: MG81 effectors
  REGION 1..355: note = Description: MG81-596 effector
MILVYRYRVKSLNGLLNKQSRAVNFVWNFCNDRQKDALRFGRRWHTGFDLNKLTAGSSKELGLHSGTVNAVCEQYAKSRSQKKRPFLRYRGKRSLGWVPLKGRELKLEGIFFRFACNTFRVFNSRALPEGKIKDGTNFSRDSRGNWFLNIVIDVDVVAPDARAPVRGVGIDLGLKDFATLSTGEKIQAQHIYRGAQQALAVAQRANKKKRVKAIHAQIANRRNDFHHKLSTRIVREFDYIAVGNVNAAGLAKTSMAKSVLDAGWSSFRTQLAYKAVKHGAWFEEVNEAFSTQTCSDCGSMPDSRPKGIAGLGIRSWICSVCGGVHDRDVNAAKNILNKLGSRAGHGTPVVGIPVL

SEQ ID NO: 2317 - protein, 522 aa, unidentified
  REGION 1..522: note = Description of Unknown: uncultivated organism sequence
  REGION 1..522: note = Category: MG81 effectors
  REGION 1..522: note = Description: MG81-597 effector
MKKSSTDTCCLTLPLKLEKWQSDRLEKRFEIGRQIYNTVVRAELKKLQQVERTPQYREIEQKLKKAKQEEAKELWKTRTQLLSKSGFSEYGFKSDMKYYYQHFKENIGSSVAVHGIASQVWTAFEKVLFSKDGKMVHFKKKGELSSLRGYSQAGKSGGIEIIFRGSYVEWKGLKLPLKLSPDNDYETEMLSKRVKYVRILRKEGKTKPHWYAQLVLEGKPAIKRDPASGAPKHPVGHGVVGIDIGTRTLAYSADSKVDLIELADRVQNIEQEKMLLQRKLDRSRRATNPENYKPDGTIKKGVKLTRNKSKRYRKIQHQLAMLQHRQADIRKRQHNELANYLLTLGDCFFVEDMDYRALTRKAKKTEISEKTGRYKRKKRFGKSIANKAPSMLIALLDQKCKSLNLEGVKKVDTAVKASQYNHQTDECKAKELKERWNIMPDGERIQRDLYSAFLLQHCRRDLPEYNRKKLQETFGNELYRVFDREALQRDYPKFVEYHRETIQRLSALPKTIASMGIRRSIS

SEQ ID NO: 2318 - protein, 512 aa, unidentified
  REGION 1..512: note = Description of Unknown: uncultivated organism sequence
  REGION 1..512: note = Category: MG81 effectors
  REGION 1..512: note = Description: MG81-598 effector
MKKSSTDTCCLTLPLKLEKWQEDRLAKRFEIARQLYNTLVHAELKRLVQIKRTAEYRENERKIRTLDWNNPAHRTELEKLYEERRKSLKKAGFTDNSFTTDMGKYYKHFRDNIGSSVAVHGIAPQVWAAFDKLLFKKGGKKVHCKRPGEVNSVQGYSRTGKSGGREIMFRGAYIEWKGLKLPLKLSPDNAYETDMLQRRVKLVRLVRRPGKRRDRWYAQLVLEGKPAIKADPVTGKAVHPIGSGPVGLDIGPQTLAYSAAGVAGLVELADRVQNIEQEKRCLQRKMDRSRRATNPDNYAEDGTIRRGVKLTHNKSKRYRRNQQELKYLQHRQAEIRKLQHIQLANHLLSLGDHFYVEKMEWSSLTRRAKKTVISEKTGKPRSKKRFGKSIANKAPAMLIEILRQKCKSLGLPNVVEINPADIKASQYNHLTGEYVKKSLSRRWNDMQDGEHLQRDLYSAFLLQHYDSMSKALDLDSLARDYPAFVQYHHREIERLHALPKTPASMGIRRSIA

SEQ ID NO: 2319 - protein, 511 aa, unidentified
  REGION 1..511: note = Description of Unknown: uncultivated organism sequence
  REGION 1..511: note = Category: MG81 effectors
  REGION 1..511: note = Description: MG81-599 effector
MGKSSTDTCCLTLPLKLEKWQEDRLAKRFEIARQIYNTMVRAELKKLDRVKQLPEYRKNQKEIQALDWKNSADKQRLKELRANQNRILQKQGFTEYGFKADSKDYYKHFIENIGSSVATHGIAPQVWNAFDKMLFQKDGKVVHFKRYGDVHSLKGGSVAHKSGGAEIMFRKTYIEWKGLKLPLKLSPNNAYEAEMLSYRVKYVRILRTRGKTKDRWYAQLSLEGKPAVKYDSSTGKPVHPVGRGAVGLDIGPQTLAYAAANEANLVELADQVQNIEQEKRRLQRKLDRSRRATNPDNYNENGTIRRGVKLTHNKSKRYCKLQKELSWIQHCQAETRKRQHIALANHLLSLGDCFYVEPMAWPSLTHRAKKTEVSEETGRIKRKKRFGKSVANKAPASLIGILKLKCISLGLTGVVEVPMLLRASQYNHQSKDYAKKSLSQRWNDMPDGNRIQRDLYSAFLLQHYNSQLENFDQETLERDYPQFVRLHNQTIQRLSALPKTPSSMGIRRSVS

SEQ ID NO: 2320 - protein, 512 aa, unidentified
  REGION 1..512: note = Description of Unknown: uncultivated organism sequence
  REGION 1..512: note = Category: MG81 effectors
  REGION 1..512: note = Description: MG81-600 effector
MKKSNTDTCCLTLPLKLEKWQEDRLAKRFEIARQLYNTLVHAELKRLAQVKQTAEYRENERKIRALDWNDPGDQAKLKGLYKERRKSLKTAGFTDYSFTTDMGKYYKHFRDNIGSSVAVHGIAPQVWAAFDKLLFKKGGKKVHYKKPGEVNSVQGYSRTGKSGGTEIMFRGPYIEWKGLKLPLKLSPDNAYETDMLQRRVKLVRLVRRPGKRRDRWYAQLVLEAKPAIKADPVTGKAVHPIGSGPVGLDIGPQTLAYSAAGAAGLVELADRVQNIEQEKRCLQRKMDRSRRAANPDNYAEDGTIRRGVKLTHNKSKRYRRSQQELKYLQHRQAEIRKLQHIQLANHLLSLGDHFYVEKMEWSSLTHRAKKTVISEKTGKPRSKKRFGKSIANKAPAMLIEILRQKCKSLGLPNVVEINPADIKASQYNHLTGEYVKKSLSRRWNEMQDGEHLQRDLYSAFLLQHYDSMSKALDLDSLARDYPAFVQYHHREIERLHALPKTPSSMGIRRSIA

SEQ ID NO: 2321 - protein, 528 aa, unidentified
  REGION 1..528: note = Description of Unknown: uncultivated organism sequence
  REGION 1..528: note = Category: MG81 effectors
  REGION 1..528: note = Description: MG81-601 effector
MRRKNVYNNSNMERRDSCGKSSTDTCCLTLPLKLEKWQEDRLAKRFEIARQIYNTMVRAELKKLERVKQLPEYRKNQKEIQALDGKNSADRARLKELRANQNRILQKQGFTKYGFKSDSKDYYKHFIENIGSSVATHGIAPQVWNAFDKMLFQKDGKVVHFKRHGDVHSLKGGSVTHKSGGAEIMFRKTYIEWKGLKLPLKPSPNNAYEAEMLSYRVKYVRILRTRGKTKDRWYAQLSLEGKPAVKFDSSTGKLVHPVGRGAVGLDIGPQTLAYAAADEANLVELADQVQNIEQEKRRLQRKLDRSRRATNPDNYNENGTIRRGVKLTHNKSKRYCKLQKELSWIQHCQAETRKRQHIALANHLLSLGDCFYVEPMAWPSLTHRSKKTEFSEKTGKIKRKKRFGKSVANKAPASLIGILKLKCISLGLTGVVEVPMLLRASQYNHQSKDYEKKSLSQRWNDMPDGNRIQRDLYSAFLLQHYNSQSESFDQETLERDYPQFVRLHNQTIQRLSALPKTPSSMGIRRSVS

SEQ ID NO: 2322 - protein, 379 aa, unidentified
  REGION 1..379: note = Description of Unknown: uncultivated organism sequence
  REGION 1..379: note = Category: MG81 effectors
  REGION 1..379: note = Description: MG81-602 effector
MLFHKEGKKVHYKKKDDIHSLRGYSVTGKSGGVEIIFRETYIEWKGLKLPLKRSPDNAYETEMLSRRVKYVRLLRKPGKRKDRWYAQLSLEGKPAIKRDPESGELRHAIGRGAVGLDIGPQTLAYSACGAADLVELADQVQNIEQMKRRLQRKLDRSRRATNPNNYADNGTIRRGVKLTHNKSNRYRRTQRELRYLQHRQAEIRKRQHIELANRLLALGNCFYVEDMAWPSLTHRAKETAISEKTGRIKRKKRFGKSVANKAPATLIGILEQKCNSLGLPGVMKVPTSLRASQYNHQSGEYTSKPLSQRWNDMPDGERIQRDLYSAFLLQHYDPQAGNFNSALLQQDYPQFVQYHHRAIQRLSTAPKTLSSMGIQRSLR

SEQ ID NO: 2323 - protein, 512 aa, unidentified
  REGION 1..512: note = Description of Unknown: uncultivated organism sequence
  REGION 1..512: note = Category: MG81 effectors
  REGION 1..512: note = Description: MG81-603 effector
MPTKQKEGGNRCVLTLPLLTEPWQEHIIEKRFKIIEHLKNQLISIELRKLKNLQRTKAYKNLIKQIESVPKSERTVLYKERNKMLKDAGFSQYTFMDDMAGKKSLMQKHFESHINVQIAHKAAIDVWSSFEKFLFGTGQIVHYQKRGTLSSVASKSPKTGMFYYSDENIFKWSGGGTKPKGGIILCLRVASVKTNYEKEMVANNEIKYYRVVRKWMKTKYKYYLQITFAGKPADKHREISTGRVGIDIGTQTIAIASDKSVKLLELADKVNKNNIKKCELQRKLDRSRRYTNPDNFNPDGTVKRGTKGHKLKWNKSKHYIEIAGKIRELERKNADIRKYQHTCLANDILAMGNQIYIEPMNYKGLQKRAKETQVDEKGRYKKKKRFGKSLANKAPAMFVTILKTKAEQHGGEVYEVDIMLYRASQCDHTTGEYTKHGLNDRWRILGNGDKVQRDLYSAFLIKNSNKTHDEIDLDKCSKTYDNFKKLHDKEIENIRNEVKLRERKNISSYGIA

SEQ ID NO: 2324 - protein, 480 aa, unidentified
  REGION 1..480: note = Description of Unknown: uncultivated organism sequence
  REGION 1..480: note = Category: MG81 effectors
  REGION 1..480: note = Description: MG81-604 effector
MAGKSDKACCVLTLPLLTEPWQEHIIEKRFRIMEHLKNSLIALELRKLKNIQRTKQYRQLEAEISNAPKENRKTLYKKRNELLKNAGFSEFAFIDDMTNMQKHFVEHIATQIAHKSASDVWSSFEKVLFNTGRKIHFIRRGSLSSIACKKDGNGMRFRNGMLHWNGGQCKNKVKLELRVACPKTPYECAMLEKKIKYERIIRKWVKTRYKYYVQFTLDGNAVPKPRKMGTGRVGIDIGPSSIAIASSQEVRLMELADKSFSDQTTNPDNFNENKTIRRGVKLSWHYSKHYQKLRGQVRELERKNADIRKYQHTCLANYILSLGTEVYIEQMNFKGLQARAKETTYNKNGRANRKKRFGKSIANRAPAMLVTILETKLKSYAGTELHKVNTWSYRASQYDHITDTYTKKLLRQRWAELGNGDRIQRDLYSAFLLMNSQPSLQSTDRERCSKTYSQFKSLHDQEIYRLQQTPERHLSSFGIA

SEQ ID NO: 2325 - protein, 550 aa, unidentified
  REGION 1..550: note = Description of Unknown: uncultivated organism sequence
  REGION 1..550: note = Category: MG81 effectors
  REGION 1..550: note = Description: MG81-605 effector
MGWKSKGRGGTLVDNEEKKEDGATCCLTLPLKLEKWQSDHLEKRFEIARQLYNTLVHAELKKKCQVERMPEYQEIMKMIDAASNQKEKWALEKKRKAFLEENGFSRNAFKADMEKYYKHFNDNIGANVALHGITAQVWIAFDKVFVDNYKQKGKVHFKKPGELCSVQGYSQKKSGGKEIMFREDRIIWNQQGNRDRKKVKREFLLKLSPDNPYEAEMLKRHVKFVRILRKDGKTKPHWYAQLVLEGKPAVKRDPASGAPKHPIGHGVVGIDIGTRTLAYSTDKEVNLLELADRVQNIEQEKRRLQRKMDRSRRATNPENYNPDGTFKRGVKLTRNKSKRYKRIQHQYAMIQHHQADIRKQQHNELANYLLTLGDCFFVENMSYCDLVHRANKTEISEKTGRYKRKKRFGKSIANKAPAMLITMLKQKCQSRGLEGVKEVDTHVRASQYNHQTDTCIEKALENRWNVMPDGERIQRDLYSAFLLQHCKQGLPEYNRKELKKEFGEELYRVFDREALQRDYPQFVAYHHMTIQRLSELPHTIPSMGIRRIIS

SEQ ID NO: 2326 - protein, 512 aa, unidentified
  REGION 1..512: note = Description of Unknown: uncultivated organism sequence
  REGION 1..512: note = Category: MG81 effectors
  REGION 1..512: note = Description: MG81-606 effector
MPAKQKEGGNRCVLTLPLLTEPWQEHIIEKRFKIIEHLKNQLISIELRKLKNLQRTKAYKNLIKQIESVPKSERTALYKERNKMLKDAGFSQYTFMDDMAGKKSLMQKHFESHINVQIAHKAAIDVWSSFEKFLFGTGQIVHYQKRGTLSSVASKSPKTGMFYYSDENIFKWSGGGTKPKGGIILCLRVAPVKTNYEKEMVANNETKYYRVVRKWMKTKYKYYLQITFAGKPADKHREISTGRVGIDIGTQTIAIASDKSVKLLELADKVNKNHIKKCELQRKLDRSRRYTNPDNFNPDGTVKRGTKGHKLKWNKSKHYIEIAGKIRELERKNADIRKYQHTCLANDILAMGNQIYIEPMNYKGLQKRAKETQVDEKGRYKKKKRFGKSLANKAPAMFVTILKTKVEQHGGEVYEVDIMSYRASKCDHTTGEYTKHGLNDRWRILGNGDKVQRDLYSAFLIKNSNKTHDEIDLDKCSKTYDNFKKLHDKEIENIRNEVKLRERKNISSYGIA

SEQ ID NO: 2327 - protein, 512 aa, unidentified
  REGION 1..512: note = Description of Unknown: uncultivated organism sequence
  REGION 1..512: note = Category: MG81 effectors
  REGION 1..512: note = Description: MG81-607 effector
MKKSSTDTCCLTLPLKLEKWQEDRLAKRFEIARQLYNTLVHAELKRLAQVKQTAEYRENERKIRTLDWNDPGDQAKLKGLYKERRKSLKTAGFTDYSFTTDMGKYYKHFRDNIGSSVAVHGIAPQVWAAFDKLLFKKGGKKVHYKKPGEVNSVQGYSRTGKSGGTEIMFRGPYIEWKGLKLPLKLSPDNAYETDMLQRRVKLVRLVRRPGKRRDRWYAQLVLEGKPAIKADPVTGKAVHPIGSGPVGLDIGPQTLAYSAAGAAGLVELADRVQNIEQEKRCLQRKMGRSRRATNPDNYAEDGTIRRGVKLTHNKSKRYRRSQQELKYLQRRQAEIRKLQHIQLANHLLSLGDHFYVEKMEWSSLTHRAKKTVISEKTGKPRSKKRFGKSIANKAPAMLIEILRQKCKSLGLPNVVEINPADIKASQYNHLTGEYVKKSLSRRWNEMQDGEHLQRDLYSAFLLQHYDSMSKALDLDSLARDYPAFVQYHHQEIERLHALPKTPSSMGIRRSIA

SEQ ID NO: 2328 - protein, 525 aa, unidentified
  REGION 1..525: note = Description of Unknown: uncultivated organism sequence
  REGION 1..525: note = Category: MG81 effectors
  REGION 1..525: note = Description: MG81-608 effector
MAKNNNNTDTCVLTLPLRVEKWQEDCLLKRFEAARRIYNSLLNFELKKLRQLERTVEYRQIQSVISSAYRSNTKDSPECKDAFKRREKLISANGISEYGFKSDVKFFYKHFDGLIGSNVAVHCIAVQLWAAFDKYLRGSGKEIHFKRLGDISSLKGYSVKGKSGGCEIIFRGQYIEWTRKKKKLLLPLKIDPDNEYEREMLSRRVKYVRIIKKPGKNRLRWYAQLTLEGKPALKYSAETGKPIHSVGKGNVGIDIGPQTVAYASDKEVALLELADRVTNIEHQKKKLQRKLDRSRRATNPDNYKPDGTIKRGVKLTRNKSKRYLKLQSKLAYIQHRQAEIRKLQHTCLANHMLTLGDRFFVEKMNWPGLAHRAKETSISEKTGRYKRKKRFGKSLANKAPAMFISILKRKCETLGLPGVVEVDTYSLKASQYNHLSDTYEKKSLSERWNYMPISDGSDSSKTKRIQRDLYSAFLLQHTIPQPCSFDKKALRIDYPNFVTMHDAEIHRLESLPKTITSMGVRRSHS

SEQ ID NO: 2329 - protein, 485 aa, unidentified
  REGION 1..485: note = Description of Unknown: uncultivated organism sequence
  REGION 1..485: note = Category: MG81 effectors
  REGION 1..485: note = Description: MG81-609 effector
MKRFEIARQIYNSLLHAEQKKLRRLEQTPEYREIQRKLQELYREKAEKSRAFREIAKKRTALLKRAGFTEYAFKTDMKAYYKHFKENIGSSVAVHGIASQVWTAFDRKLYGNGKHVHFKRPGEIRSLRGYSAAGKSGGVEILFRGTHIEWKGLCLPLKQKPENAYETEMLSRRVKYVRILRTPGKHRDRWYAQLVLEGRPAVKRNTETGELLHPIGKGPVGIDIGPQTVAYVSQGEASLLELADRVRNIEQEKRKLQRKMDRSRRATNPENYAEDGTIRRGIRLTRNKSGRYRKLQKELAFLQHHQADIRKQQHIALANHLLSLGDRFYVEDMAWPSLTHRAKETVISPKTGRYQRKKRFGKSVANKAPAMFLGILTQKCVSLGLPGVVKVSTSVRASQYNHLTETYQKKPLSQRWNVMPDGRKIQRDLYSAFLLQHMTPQLDGFDPDGLRQDYESFAVLHEEAIHKLRLVPRTLTSMGLQRKCS

SEQ ID NO: 2330 - protein, 531 aa, unidentified
  REGION 1..531: note = Description of Unknown: uncultivated organism sequence
  REGION 1..531: note = Category: MG81 effectors
  REGION 1..531: note = Description: MG81-610 effector
MILLAKNNNNNNNTDTCVLTLPLRVEKWQEDCLLKRFEAARRIYNSLLNFELKKLRQLERTVEYRQIQSVISSAYRSNTKDSPECKDAFKRREKLISVNGISENGFKSDVKFFYKHFDGLIGSNVAVHCIAVQLWAAFDKYLSGSGKEIHFKRLGDISSLKGYSVKGKSGGCEIIFRGQYVEWTRKKKKLLLPLKIDPDNEYEREMLSRRVKYVRIIKKPGKNRLRWYAQLTLEGKPALKYSAGTGKPIHSVGKGNVGIDIGPQTVAYASDKEVALLELADRVTNIEHQKKKLQRKLDRSRRATNPDNYKPDGTIKRGVKLTRNKSKRYLKLQSKLAYIQHRQAEIRKLQHTCLANHMLTLGDRFFVEKMNWPGLAHRAKETSISEKTGRYKRKKRFGKSLANKAPAMFISILKRKCETLGLPGVVEVDTYSLRASQYNHLSDTYEKKSLSERWNYMPISDGSDSSKTKRIQRDLYSAFLLQHTIPQPCSFDKKALRIDYPNFVTMHDAEIHRLESLPKTITSMGVRRSHS

SEQ ID NO: 2331 - protein, 512 aa, unidentified
  REGION 1..512: note = Description of Unknown: uncultivated organism sequence
  REGION 1..512: note = Category: MG81 effectors
  REGION 1..512: note = Description: MG81-611 effector
MKKSSTDTCCLTLPLKLEKWQEDRLAKRFEIARQLYNTLVHAELKRLAQVKQTAEYRENERKIRALDWNDPGDQTKLKGLYKERRKSLKTAGFTDYSFTTDMGKYYKHFRDNIGSSVAVHGIAPQVWAAFDKLLFKKGGKKVHYKKPGEVNSVQGYSRTGKSGGTEIMFRGPYIEWKGLKLPLKLSPDNAYETDMLQRRVKLVRLVRRPGKRRERWYAQLVLEGKPAIKADPVTGKAVHPIGSGPVGLDIGPQTLAYSAAGVAGLVELADRVQNIEQEKRCLQRKMGRSRRATNPDNYAEDGTIRRGVKLTHNKSKRYRRSQQELKYLQHRQAEIRKLQHIQLANHLLSLGDHFYVEKMEWSSLTHRAKKTVISEKTGKPRSKKRFGKSIANKAPAMLIEILRQKCKSLGLPNVVEINPADIKASQYNHLTGEYVKKSLSRRWNEMQDGEHLQRDLYSAFLLQHYDSMSKALDLDSLARDYPAFVQYHHREIERLHALLKTPASMGIRRSIA

SEQ ID NO: 2332 - protein, 511 aa, unidentified
  REGION 1..511: note = Description of Unknown: uncultivated organism sequence
  REGION 1..511: note = Category: MG81 effectors
  REGION 1..511: note = Description: MG81-612 effector
MGKSSTDTCCLTLPLKLEKWQEDRLAKRFEIARQIYNTMVRAELKKLDRVKQLPEYRKNQKEIQALDWKNSADKQRLKELYGNQRKILQKQGFTEYGFKSDSKDYYKHFIENIGSSVATHGIAPQVWNAFDKMLFQKDGKVVHFKRYGDVHSLKGGSVTNKSGGAEIMFRKTYIEWKGLKLPLKLSPNNAYEAEMLSYRVKYVRILRTRGKTKDRWYAQLSLEGKPAVKYDSSTGKPVHPVGRGAVGLDIGPQTLAYAAANEANLVELADQVQNIEQEKRRLQRKLDRSRRATNPDNYNENGTIRRGVKLTHNKSKRYCKLQKELSWIQHCQAETRKRQHIALANHLLSLGDCFYVEPMAWPSLTHRAKKTEVSEETGRIKRKKRFGKSVANKAPASLIGILKLKCISLGLTGVVEVPMLLRASQYNHQSKDYAKKSLSQRWNDMPDGNRIQRDLYSAFLLQHYDSQSESFDQETLERDYPQFVRLHNQTIQRLSALPKTPSSMGIRRSVS

SEQ ID NO: 2333 - protein, 512 aa, unidentified
  REGION 1..512: note = Description of Unknown: uncultivated organism sequence
  REGION 1..512: note = Category: MG81 effectors
  REGION 1..512: note = Description: MG81-613 effector
MPTKQKEDSNRCVLTLPLLTEPWQEHIIEKRFKIIEHLKNQLISIELRKLKNLQRTKAYKNLIKQIESVPKSERTALYKERNKMLKDTGFSQYTFMDDMAGKKSLMQKHFESHINVQIAHKAAIDVWSSFEKFLFGTGQIVHYQKRGTLSSVASKSPKTGMFYYSDENIFKWSGGGTKPKGGIILCLRVASVKTNYEKEMVANNEIKYYRVVRKWMKTKYKYYLQITFAGKPADKHREISTGRVGIDIGTQTIAIASDKSVKLLELADKVNKNHIKKCELQRKLDRSRRYTNPDNFNPDGTVKRGTKGHKLKWNKSKHYIEIAGKIRELERKNADIRKYQHTCLANDILAMGNQIYIEPMNYKGLQKKAKETQVDEKGRYKKKKRFGKSLANKAPAMFVTILKTKAEQHGGEVYEVDIMSYRASQCDHTTGEYTKHGLNDRWRILGNGDKVQRDLYSAFLIKNSNKTHDEIDLDKCSKTYDNFKKLHDKEIENIRNEVILRKRRNISSYGIA

SEQ ID NO: 2334 - protein, 528 aa, unidentified
  REGION 1..528: note = Description of Unknown: uncultivated organism sequence
  REGION 1..528: note = Category: MG81 effectors
  REGION 1..528: note = Description: MG81-614 effector
MILLANNNNNTDTCVLTLPLRVEKWQEDCLLKRFEAARRIYNSLLNFELKKLRQLERTVEYRQIQSVISSAYRSNTKDSPECKAALKRREKLIDENGLTKNGFKNDVKFFYKHFDGLIGSSVAVHCIAVQLWAAFNKYLCGNGKEIHFKRLGDISSLKGYSVKGKSGGCEIIFRGQYVEWTRKKKKLLLPLKIDPDNEYEREMLSRRVKYVRIIKKPGKNRLRWYAQLTLEGKPALKYSAETGKPIHSVGKGDVGIDIGPQTVAYASDKEVALLELADRVTNIEHQKKKLQRKLDRSRRATNPDNYKPDGTIKRGVKLTRNKSKRYLKLQSKLAYIQHRQAEIRKLQHTCLANHMLTLGDRFFVEKMNWPGLAHRAKETSISEKTGRYKRKKRFGKSLANKAPAMFISILKQKCETLGLPGVVEVDTFRLKASQYNHLSDTCEKKSLSERWNYMPISDGSDSSKTKRIQRDLYSAFLLQHTIPQSCSFDKEALRIDYPNFVTMHDAEIHRLESLPKTITSMGVRRSHS

SEQ ID NO: 2335 - protein, 528 aa, unidentified
  REGION 1..528: note = Description of Unknown: uncultivated organism sequence
  REGION 1..528: note = Category: MG81 effectors
  REGION 1..528: note = Description: MG81-615 effector
MAKNNNNNNDTDTCVLTLPLRVEKWQEDCLLKRFEAARRIYNSLLNFELKKLRQLERTVEYRQIQSVISSAYRSNTKDSLECKDAFKHREKLISANGISKNGFKSDVKFFYKHFDGLIGSSVAVHCIAVQLWAAFDKYLSGSGKEIHFKRLGDISSLKGYSVKGKSGGREIIFRGQYIEWTRKKKKLLLPLKIDPDNEYEREMLSRRVKYVRIIKKPGKNRLRWYAQLTLEGKPALKYSAGTGKPIHSVGKGDVGIDIGPQTVAYASDKEVALLELADRVTNIEHQKKKLQRKLDRSRRATNPDNYKPDGTIKRGVKLTRNKSKRYLKLQSKLAYIQHRQAEIRKLQHTCLANHMLTLGDRFFVEKMNWPGLAHRAKETSISEKTGRYKRKKRFGKSLANKAPAMFISILKRKCETLGLPGVVEVDTYSLKASQYNHLSDTYEKKSLSERWNYMPISDGSDSSKTKRIQRDLYSAFLLQHTIPQPCSFDKEALRIDYPNFVTMHDAEIHRLESLPKTITSMGVRRSHS

SEQ ID NO: 2336 - protein, 534 aa, unidentified
  REGION 1..534: note = Description of Unknown: uncultivated organism sequence
  REGION 1..534: note = Category: MG81 effectors
  REGION 1..534: note = Description: MG81-616 effector
MILLANNNNNNNNNNNTDTCVLTLPLRVEKWQEDCLLKRFEAARRIYNSLLNFELKKLRQLERTVEYRQIQSVISSAYRSNTKDSPECKDAFKRREKLISANGISEYGFKSDVKFFYKHFDGLIGSSVAVHCIAVQLWAAFDKYLRGSGKEIHFKRLGEISSLKGYSVKGKSGGLEIIFRGQYIEWTRKKKKLLLPLKIDPDNEYEREMLSRRVKYVRIIKKPGKNRLRWYAQLTLEGKPALKYSAETGKPIHSVGKGNVGIDIGPQTVAYASDKEVALLELADRVTNIEHQKKKLQRKLDRSRRATNPDNYKPDGTIKRGVKLTRNKSKRYLKLQSKLAYIQHRQAEIRKLQHTCLANHMLTLGDRFFVEKMNWPGLAHRAKETSISEKTGRYKRKKRFGKSLANKAPAMFISILKRKCETLGLPGVVEVDTYNLKASQYNHLSDTYEKKSLSERWNYMPISDGSDSSKTKRIQRDLYSAFLLQHTIPQPCSFDKEALRIDYPNFVTMHDAEIHRLESLPKTVTSMGVRRSHS

SEQ ID NO: 2337 - protein, 542 aa, unidentified
  REGION 1..542: note = Description of Unknown: uncultivated organism sequence
  REGION 1..542: note = Category: MG81 effectors
  REGION 1..542: note = Description: MG81-617 effector
MPKRAEGPRCVLTMPLLTEPWQEHILETRFRIILHLKNQLVRMEWRKYKDLCRTKEFRQLEEQIEATPKEERRPLHKKRRELLKAAGLSEYRFKADISDMQKQFSRHIAVKIAENAASDVWRAFDTYLFKKGQEVHTHSLSMMRSVAGQAGNGMHYIKVTKKGKDYYFFKWNVEKEKEEPTDQKKRPSKKQTRRERIRGKKSIPLKISITPPRNAYEREMLEKPVKYLRVVRRWIKSRYKYYLQFTLEGHPVPKPKERGTGRVGIDIGTRTIAVVSGNEVHLEELVEVTDRDHRRSVDQCQRRKAALRRKMDRSSRIMNPQNFKPDGSVKPRKELTPWKRSNRYKRLAGKVRELERKNADVRKYEHSRLADRILAMGDEIFLESMNFSALQRRKKKTEKDKKGRYAKKKRFGKSIAHRAPATLVSTLERKAAQRHQTVVRVKTETFRASQLDHTTGEYRKTHLSERRKTLSNGDEVQRDLYAAFLLMNSASTWDEKKKEEVWDHSDLDACRESYGTFKVLHDAEILRIANDGRQHPSSFGIA

SEQ ID NO: 2338 - protein, 511 aa, unidentified
  REGION 1..511: note = Description of Unknown: uncultivated organism sequence
  REGION 1..511: note = Category: MG81 effectors
  REGION 1..511: note = Description: MG81-618 effector
MAKCSTDTCCLTLPLRLEKWQEDRLAKRFEIARQIYNTMVRAELKKLRAMEQSEPYKANQEKIQALDWKTQTDKQALKALYKERDKLLRDGGFSEYGFKSDIKNYYKHFNNNIGSNVAFHGIAPQVWAAFEKMLFKKEGKKVHFKKKGDIHSLRGYSAAGKSGGVEIIFRETYIEWKGLKLPLKLSPDNIYETQMLSYRVKYVRLLRKPGKRKDRWYAQLSLEGKPVIKYNPKTGEVRHPIGKGAVGLDIGPQTLAYSAATGADLVELANQVQNVEQEKRRLQRKLDRSRRATNPGNYADDGTIRRGIALTHNKSKRYLRTQQELKYLQHQQAEIRKRQHTELANHLLSLGDCFYVEKMVWTSLTHRAKETEISEKTGKIKRKKRFGKAVANKAPATLIGILQRKSAALGIPGVIEVPTSVKASQYNHQSGTYTPKPLSQRWNNMPDGERIQRDLYSAFLLQHYDPQTNTFDANSLHQDYPQFVQYHHDAVLRLYAMPKTPSSMGIKRSLR

SEQ ID NO: 2339 - protein, 538 aa, unidentified
  REGION 1..538: note = Description of Unknown: uncultivated organism sequence
  REGION 1..538: note = Category: MG81 effectors
  REGION 1..538: note = Description: MG81-619 effector
MDNEEKKEDGATCCLTLPLKLEKWQSDHLEKRFEIARQLYNTLVHAELKKKCQVERMPEYQEIMKMIDAASNQKEKWALEKKRKAFLEENGFSRNAFKADMEKYYKHFNDNIGANVALHGITAQVWIAFDKVFVDNYKQKGKVHFKKPGELCSVQGYSQKKSGGKEIMFREDRIIWNQQGNRDRKKVKREFLLKLSPDNPYEAEMLKRHVKFVRILRKDGKTKPHWYAQLVLEGKPAVKRDPASGAPKHPIGHGVVGIDIGTRTLAYSTDKEVNLLELADRVQNIEQEKRRLQRKMDRSRRAMNPENYNSDGTFKRGVKLTRNKSKRYRRIQHQLAMIQHHQADIRKQQHNELANYLLTLGDCFFVENMSYCDLVHRANKTEISEKTGRYKRKKRFGKSIANKAPAMLITMLKQKCQSRGLEGVKEVDTHVRASQYNHQTDTCIEKALENRWNVMPDGERIQRDLYSAFLLQHCKQGLPEYNRKELKKEFGEELYRVFDREALQRDYPQFVAYHHMTIQRLSELPHTIASMGIRRSIS

SEQ ID NO: 2340 - protein, 512 aa, unidentified
  REGION 1..512: note = Description of Unknown: uncultivated organism sequence
  REGION 1..512: note = Category: MG81 effectors
  REGION 1..512: note = Description: MG81-620 effector
MKKSSTDTCCLTLPLKLEKWQEDRLAKRFEIARQLYNTLVHAELKRLAQVKQTAEYRENERKIRALDWNDPGDQTKLKGLYKERRKSLKTAGFTDYSFTTDMGKYYKHFRDNIGSSVAVHGIAPQVWAAFDKLLFKKGGKKVHYKKPGEVNSVQGYSRTGKSGGTEIMFRGPYIEWKGLKLPLKLSPDNAYETDMLQRRVKLVRLVRRPGKRRDRWYAQLVLEGKPAIKADPVTGKAVHPIGSGPVGLDIGPQTLAYSAAGAAGLVELADRVQNIEQEKHCLQRKMDRSRRATNPDNYAEDGTIRRGVKLTHNKSKRYRRSQQELKYLQRRQAEIRKLQHIQLANHLLSLGDHFYVEKMEWSSLTHRAKKTVISEKTGKPRSKKRFGKSIANKAPAMLIEILRQKCKSLGLPNVVEINPADIKASQYNHLTGEYVKKSLSRRWNEMQDGEHLQRDLYSAFLLQHYDSMSKALDLDSLARDYPAFVQYHHREIERLHALPKTPASMGIRRSIA

SEQ ID NO: 2341 - protein, 523 aa, unidentified
  REGION 1..523: note = Description of Unknown: uncultivated organism sequence
  REGION 1..523: note = Category: MG81 effectors
  REGION 1..523: note = Description: MG81-621 effector
MILLAKNNNNNTDTCVLTLPLRVEKWQEDCLLKRFEAARRIYNSLLNFELKKLRQLERTVEYRQIQSVISSAYRSNTKDSPECKDAFKRREKLIDENGLTKNGFKNDVKFFYKHFDGLIGSSVAVHCIAVQLWAAFNKYLCGNGKEIHFKRLGDISSLKGYSVKGKSGGCEIIFRGQYVEWTRKKKKLLLPLKIDPDNEYEREMLSRRVKKPGKNRLRWYAQLTLEGKPALKYSAETGKPIHSVGKGDVGIDIGPQTVAYASDKEVALLELADRVTNIEHQKKKLQRKLDRSRRATNPDNYKPDGTIKRGVKLTRNKSKRYLKLQSKLAYIQHRQAEIRKLQHTCLANHMLTLGDRFFVEKMNWPGLAHRAKETSISEKTGRYKRKKRFGKSLANKAPAMFISILKRKCETLGLPGVVEVDTYSLKASQYNHLSDTCEKKSLSERWNYMPISDGSDSSKTKRIQRDLYSAFLLQHTIPQPCSFDKEALRIDYPNFVIMHDAEIHRLESLPKTITSMGVRRSHS

SEQ ID NO: 2342 - protein, 510 aa, unidentified
  REGION 1..510: note = Description of Unknown: uncultivated organism sequence
  REGION 1..510: note = Category: MG81 effectors
  REGION 1..510: note = Description: MG81-622 effector
MAKATTDTCCLTLPLVLEKWQSDRLAKRFELARQIYNTLLNYELKKLRRLEKTEEYAAGQAKLKELNDRQERDEAARKECHRQLNELRKAAGFSEYDFKTDVKPFYKHFGDNVGSSVAVHGIASQVWQAFERLFYGNGKAVHFKKRGEIRSLRGYSVSGKSGGVEIMFRGSYIEWKGLRLPIKLDADNAYEAEMLQKRVKYCRIVRKEGRRKTRWYVQLMLEGKPALKCDPDTGALRHPTGSGPVGIDIGPQTVAYAAETEAVLQELADGVKDIEREKRTVQRKLDRSRRATNPECFAADGTIKRGVKLNWRKSKRYLALQRELASLQRQQAEIRKRQHTELANHLLSLGDRFYVEDMAWPALTHRAKETAISEKTGRYKRKKRFGKSVGNKAPAMLIGILDQKLRSRGMGGVVKVPTTVRASQFNHVTGEYQKKPLSQRWNEMPDGRRIQRDLYSAFLLQHVNEAQDGFDVAALIRDYENFVTLHDRMIETLKTAPKTLTSMGIWRTAS

SEQ ID NO: 2343 - protein, 495 aa, unidentified
  REGION 1..495: note = Description of Unknown: uncultivated organism sequence
  REGION 1..495: note = Category: MG81 effectors
  REGION 1..495: note = Description: MG81-623 effector
MPNTDSNRCILTLPLMTEPWQEHLIETRFDIMEHLKNSLIALELRKLKNLQRTRAYKELEKKIFEKPKEERKPLYKERSAMLRTAGFSEFDFINDMTPMQKHFADHIAAQISHRSASDVWRAFESYLFSSGREVHFQKRGTLDSVACKKAGNGMNYRNDTFEWSGGRTPNAKRLCIRVEKPQTEYEKHMLEKEVKNMRIIRKWMKTRYKYYLQLTLVGDPYQKPRKIGEGRVGIDIGTRTIAIASETTVRLLELADRIDGNHKRKCELQRKMDASKRATNPDNFNSDGTIRRRSKGKKMTWHFSKHYLRMRDQVRELERKNADIRTYQHNCLANEVLTLGTDVFVEPMSYKGLQHRAKETKVDEKGRYLKKKRFGKSLANKAPSKFLMILENKLACKGKALNYVDINRFRASQFDHTNGTYRKKQLSERFATLSTGEHVQRDMYSAFLLMNSNDSLNAPDIERCGQTFERFKELHAIEVERIRQSPYRRIQSFGI

SEQ ID NO: 2344 - protein, 522 aa, unidentified
  REGION 1..522: note = Description of Unknown: uncultivated organism sequence
  REGION 1..522: note = Category: MG81 effectors
  REGION 1..522: note = Description: MG81-624 effector
MKKSSTDTCCLTLPLKLEKWQSDRLEKRFEIGRQIYNTVVRAELKKLHQVERTPQYREIEQKLKEAKQEEAKELWKKRTQLLSKSGFSEYGFKSDMKYYYQHFKENIGSSVAVHGIASQVWTAFEKVLFSKDGKMVHFKKKGELSSLRGYSQAGKSGGIEIIFRGSYVEWKGLKLPLKLSSNNDYETEMLSKRVKYVRILRKEGKTKPHWYAQLVLEGKPAIKRDPASGAPKHPVGHGVVGIDIGTRTLAYSADSKVDLIELADRVQNIELEKMLLQRKLDRSRRATNPENYKPDGTIKKGVKLTRNKSKRYRKIQHQLAMLQHRQADIRKRQHNELANYLLTLGDCFFVEDMDYRALTRKAKKTEISEKTGRYKRKKRFGKSVANKAPSMLIALLDQKCKSLNLEGVKKVDTAVKASQYNHQTDECKAKELKERWNIMPDGERIQRDLYSAFLLQHCKRGLPEYNRKKLQEAFGNELYRVFDREALQRDYPKFVEYHRETIQRLSALPKTIPSMGIRRIIS

SEQ ID NO: 2345 - protein, 496 aa, unidentified
  REGION 1..496: note = Description of Unknown: uncultivated organism sequence
  REGION 1..496: note = Category: MG81 effectors
  REGION 1..496: note = Description: MG81-625 effector
MAKNEQNCCVLTLPLLTEPWQEHIIETRFRIMEQLKNALIAKELGKLNNLKRTREWKRLMKSIQDAKDEKEKKQLFKKRTELLRNVGFSDFSFSNDVTNLKIHKHFAEHINSGIAQRAGKDVWRAFEKYLFSDGKTVHFHRRGTLDSVANRYAREGMMIDGDILTWKGGQSDHQIVLKIRIRRLKNAYEREMLQKTVRNLRIVRKWMKTRYKYYLQITLQGDPASKYRSVGKGRIGIDIGTQTIAWSSPTEVRLAELAAGIKRNHAEKTALQRKMDRSRRTANPQNYNPDGTIRRGVKLRWVKTKHYLRMEGRVRELERKNADIRKYEHICMANHILSLGNEVYIEDMSFKGLQGRAKETKLDKNGRFARKKRFGKSLANRAPSMFVTILENKLKASGGSLHKVNTRTFRASQYDHTADEFKKKTLGQRWNHLKNGDKIQRDLYSAFLLMNAAPSLEEPDKKLCGKTYPQFNRLHDAEMERLRAEEKPHLSSMGIH

SEQ ID NO: 2346 - protein, 540 aa, unidentified
  REGION 1..540: note = Description of Unknown: uncultivated organism sequence
  REGION 1..540: note = Category: MG81 effectors
  REGION 1..540: note = Description: MG81-626 effector
MATTDKKDEENLRAYKFRLDPNQAQTTALYQAVGAARYTYNMLTAYNLEVNRLRDDYWKRRHDEGISDADIKKELNALAKEDKRYKQLNYGAFGTQYLTPEKKRHEQAEHRIENGEDPSVVWNQETERSANPWLHTANQRVLVSGLQNASDAWDNFWASRTGKRAGRLVGTPRFKKKGISRDSFTVPAPEKMGAYGTAYLRGEPAYKQGRRKITDYRHVRLSYLGTIRTFNSTKPLVKAVAAGAKIRRYTVSRNADRWYVSFLVKFSEPIRRSATKRARAAGSVGVDLGVKYLASLSDSEAPQRFPNLKFVEGLPSLENPRWSEASSRRLHKLQRALARSQKGSNRRSRLVKQIARLHHMTALRRESNLHQLTKKLATEYTLVGFEDLNVSGMTASAKGTVENPGKNVAQKSGLNRVVLDAAFGVFRNQLEYKAVWYGSAFEKVDRYFASSQTCSECGRKAKTKLTLRDRVFDCAYCGNMMDRDLNAAVNICREAQRLFDEKLASEDGESLNGRGSRGALRGAETVEASRPPASHRRGSP

SEQ ID NO: 2347 - protein, 509 aa, unidentified
  REGION 1..509: note = Description of Unknown: uncultivated organism sequence
  REGION 1..509: note = Category: MG81 effectors
  REGION 1..509: note = Description: MG81-627 effector
MARCTTPTCVLTLPLRLEKWQEDRLAKRFEIARKIYNTFLGVKLKELRRLEQTPEYRAIKKELAALYSEKEKNADRIRALYEERNALLKNFTEFKFKKDIKFYYKHFNSNIASKVATHCIASQVWSAFEKYLFGNGKRIHFKRPGEIYSLRGFSATNARSGGSEIIYRGDHIEWNKLRLPLKLDPGNQYEEEMLTNRVKYVRILRRPGKNRDHWYAQLTLEGLPSIKRDDETGDPVHPIGNGPVGIDIGPQTIAYSSAKEAGLLELADRVQNIEDKKCRIQRKMDRSRRATNPGNYNPDGTIKRGVPLTRNKSKRYLRLQKELAWIQHQQAAIRKEQHVALANYLLTLGDRFYIEDMNWQGLARRAKGTAVPEEEKPHKRKKRFGKSIANKAPAALVTILKNKCTSLGLPGVIPINTKVRASQYNHLTDSYQKKELSQRWNEMPDGRKIQRDLYSAFLLQHMNSQLDGFDRAALQRDYESFVSLHDQAILRAAAAPKLISSMGVKRTAN

SEQ ID NO: 2348 - protein, 530 aa, unidentified
  REGION 1..530: note = Description of Unknown: uncultivated organism sequence
  REGION 1..530: note = Category: MG81 effectors
  REGION 1..530: note = Description: MG81-628 effector
MILLAKNNNNNNTDTCVLTLPLRVEKWQEDCLLKRFEAARRIYNSLLNFELKKLRQLERTVEYRQIQSVISSAYRSNTKDSPECKDAFKRREKLISANGISENGFKSDVKFFYKHFDGLIGSNVAVHCIAVQLWAAFDKYLSGSGKEIHFKRLGDISSLKGYSVKGKSGGREIIFRGPYIEWTRKKKKLLLPLKIDPDNEYEREMLSRRVKYVRIIKKPGKNRLRWYAQLTLEGKPALKYSAETGKPIHSVGKGNVGIDIGPQTVAYASDKEVALLELADRVTNIEHQKKKLQRKLDRSRRATNPDNYKPDGTIKCGVKLTRNKSKRYLKLQSKLAYIQHRQAEIRKLQHTCLANHMLTLGDRFFVEKMNWPGLAHRAKETSISEKTGRYKRKKRFGKSLANKAPAMFISILKRKCETLGLPGVVEVDTFRLRASQYNHLSDTYEKKSLSERWNYMPISDGSDSSKTKRIQRDLYSAFLLQHTIPQPCSFDKEALRIDYPNFVIMHDAEIHRLESLPKTITSMGVRRSHS

SEQ ID NO: 2349 - protein, 1387 aa, unidentified
  REGION 1..1387: note = Description of Unknown: uncultivated organism sequence
  REGION 1..1387: note = Category: MG81 effectors
  REGION 1..1387: note = Description: MG81-630 effector
MKLTKVEKARIAVSREKKDSGRIILYTNPEDVKKTSVTTMEQQVSKRIDQANKLYQVFFKSVIPVELNKHFAEISKIAAKCRNTEEFYKKACGYSGYEWTDAKQKKRTSQISRFSYTSSGKNMYVVMDNFVKEYMVQIWQEKDFRNAAVKILCCICDGKKFASKLEKVKKESPDTLKKFIEISGKCEGNPFVDYDTSFLEKVFTLVISQMVKNCDRKSYEQDDKEKIKKSIQKEIQWLSHVQSVTERSFGREGKTYLLFKIRNPYATEERLQTVLIRMRKTLKRGRNRDIAIVLLQGLAQMNQVTFTDTVKHLYQEEEKAFCDFIDAVNRDYYRVNIVKSVRNMDVKVQPDLNDNSILKLSGLGNIKKEALSDTLLRYAASADESDQVLLDIKKLLFEYFLPENSKETSKYTTVQNLWNIPYLPKIFFDYGFENEDSDDDNECAEDIETLCDVEPQYKINQHSLKRRIRYVNYGKYLQMTKNESDRERRYWIHYIKEFVEKNYVDSGRTLSEKNCYASSMMLNCWKEIIRYLCGKYIDIGKAVFHFTNLTAMPKPKDKIIYGQLEEQYKKGISSFDYEAIKAEETLQRDIVQSVVAAAFAFSKSVIDETKMEECQETNKEDILFLSENVLGSLLKENTIKLILRFYGGESSVAQKEYFDQQEIVQEMISHLKSIRNENFHYLDGAKKDNPHKYASILWKNDEMAYQKLTKQRYYANNVGLFYRAEEIQELVQELYSQKNITEAQIPAFRTVLKRKDLPGYMEELGILFPDNTQEKSKGDFEGTLYFLMKEIYYRDFIVKDKAAAYFFKAVDQNKEQSKKEDKHTERAAENFHRYVKSLEKKYNKKEISFGTVCQYIMMEYNQQNTTKQETEIYKHFKMLISLCIRKAFGNYIKETYRFLFHPIYSKQQGEPEYLDTLELESGVKEKNYEWFTLAHFLHPVQLNHLVGDLKSYIQYREDILRRIVFAEQRVYADQQKEVQQKVKTAKEILEVLEFVRKVSGRVSNEYTDYYENEEEYAEFLYQYIDFRKREGKSAFESLKYFCQNILDSGTVVDLYADTENPKVLRNIELTRMYAGSNVKIPEYEKITEDEIKMYYQEKNSVALILSRGLCRNEKEQKKVIEFNWKKKRLTLNEITDVFSLVNDLLGKMISFSYLRERDQMYLLLGFYYMALCAENKSENHLGWKGETLDKLESSDSKFDIGGGLVLYQIVSAFNFGSKLLYISEDGRWKMAGGAFPGKYGRFENDYNHRTSLSKVIRLFENESYEREIIYWRDYVDHMKYYVNQNQSIMEIYSAFYSKVLGYSAKLRKSVVFNLQAALEKHHINPECIWMTSDGKCADIKLMKNLESQKFTYKLAKREGEKTERKICMNALNENFLKTIRTSLEYKK

SEQ ID NO: 2350 - protein, 505 aa, unidentified
  REGION 1..505: note = Description of Unknown: uncultivated organism sequence
  REGION 1..505: note = Category: MG81 effectors
  REGION 1..505: note = Description: MG81-631 effector
MARAQTDTCCLTLPLKLEKWQSDRLDKRLEIARQIYNTLLRFELKKLLRLEESKEYTDIQNSLKEITDNTERNKLYKQIDKLRQKAGFSEYAFKTDIKEFYKHFSDNIGSSVAVHGIAAQVWTAFDRLFYGNGKAVYYKRRGELNSVRGYSVAGKSGGIEIIFRGNYIEWKGLKLPIKLDLTNTYENEMLQRRVKYCRLLKKPGRTKERWYVQLMLEGKPAIKVDKNTGELRHPVGRGAVGIDIGPQTIAYVSDSEIDLKELADQVNNIEREKRVLQRKLDRSRRATNPDNYAPDGTIKRGVKLSHNKSKRYIKTQRELAALQRQQADIRKRQHNELANHLLSLGDCFYIEKMEWPALTHRAKQTEISEKTGKDKRKKRFGKSVGNKAPATLTGLLDQKLKSRGLSGIIEVDTKVRASQYNHLTDDYHKKELSERWNFMPDGRRIQRDLYSAFLLQHMNEQQDGFDKTALQRDYERFVIQHDQCIEELKRAPKTLASMGIVRRAS

SEQ ID NO: 2351 - protein, 521 aa, unidentified
  REGION 1..521: note = Description of Unknown: uncultivated organism sequence
  REGION 1..521: note = Category: MG81 effectors
  REGION 1..521: note = Description: MG81-632 effector
MMATWKGGIPVGKSSTDTCCLTLPLKLEKWQEDRLAKRFEIARQIYNTMVRAELKKMDRVKQLPEYRKNQKEIQALDWKNSADKQRLKELYGNQNRILQKQGFTKYGFKSDSKDYYKHFIENIGSSVATHCIAPQVWNAFDKMLFQKDGKVVHFKRYGDVHSLKGGSVTNKSGGAEIMFRKTYIEWKGLKLPLKLSPNNAYEAEMLSYRVKYVRILRTRGKTKDRWYAQLSLEGKPAVKYDSSTGKPVHPVGRGAVGLDIGPQTLAYAAANEANLVELADQVQNIEQEKRRLQRKLDRSRRATNPDNYNENGTIRRGVKLTHNKSKRYCKLQKELSWIQHCQAETRKRQHIALANHLLSLGDCFYVEPMAWPSLTHRAKNTEVSEKTGRIKRKKRFGKSVANKAPASLIGILKLKCISLGLTGVVEVPMLLKASQYNHQSKDYAPKSLSQRWNDMPDGNRIQRDLYSAFLLQHYNSQLENFNQETLERDYPQFVRLHNQTIQRLSALPKTPSSMGIRRSVS

SEQ ID NO: 2352 - protein, 530 aa, unidentified
  REGION 1..530: note = Description of Unknown: uncultivated organism sequence
  REGION 1..530: note = Category: MG81 effectors
  REGION 1..530: note = Description: MG81-633 effector
MILLAKNNNNNNTDTCVLTLPLRVEKWQEDCLLKRFEAARRIYNSLLNFELKKLRQLERTVEYRQIQSVISSAYRSNTKDSPECKDAFKRREKLISANGISKNGFKSDVKFFYKHFDGLIGSSVAVHCIAVQLWAAFDKYLSGSGKEIHFKRLGDISSLKGYSVKGKSGGCEIIFRGQYVEWTRKKKKLLLPLKIDPDNEYEREMLSRRVKYVRIIKKPGKNRLRWYAQLTLEGKPALKYSAETGKPIHSVGKGNVGIDIGPQTVAYASDKEVALLELADRVTNIEHQKKKLQRKLDRSRRATNPDNYKPDGTIKRGVKLTRNKSKRYLKLQSKLAYIQHRQAEIRKLQHTCLANHMLTLGDRFFVEKMNWPGLAHRAKETSISEKTGRYKRKKRFGKSLANKAPAMFISILKRKCETLGLPGVVEVDTYNLKASQYNHLSDTCEKKSLSERWNYMPISDGSDSSKTKRIQRDLYSAFLLQHTIPQPCSFDKEALRIDYPNFVTMHDAEIHRLGSLPKTITSMGVRRSHS

SEQ ID NO: 2353 - protein, 511 aa, unidentified
  REGION 1..511: note = Description of Unknown: uncultivated organism sequence
  REGION 1..511: note = Category: MG81 effectors
  REGION 1..511: note = Description: MG81-634 effector
MKKSNTDTCCLTLPLKLEKWQEDRLAKRFEIARQIYNTMVHAELKKLRNIENSQPYRQIQKQIEALNWKNQNDKARLKSLYNDRNKLLNTIGFSEYGFKADIKYYYKHFNDNIGSSVAVHGIAPQVWAAFEKMLFHKEGKKVHYKKKDDIHSLHGYSVTGKSGGVEIIFRKTYIEWKGLKLPLKRSPDNAYETEMLGRRVKYVRLLRKPGKRKDCWYAQLSLEGKPAIKRDPESGKRRHSIGRGAVGLDIGPQTLAYSACGAADLVELADQVQNIEQMKRRLQRKLDRSRRATNPDNYADNGTIRRGVKLTHNKSNRYRRTQRELRYLQHCQAEIRKRQHIELANHLLALGDCFYVEDMAWPSLTHRAKETAISEKTGRIKRKKRFGKSVANKAPATLIGILEQKCNSLGLPGVVKVPTSLRASQYNHQSGEYTSKPLSQRWNNMPDGERIQRDLYSAFLLQHYDSKAGNFDSALLQQDYPQFVQYHHRAIQRLSTVPKTLSSMGIQRSLR

SEQ ID NO: 2354 - protein, 511 aa, unidentified
  REGION 1..511: note = Description of Unknown: uncultivated organism sequence
  REGION 1..511: note = Category: MG81 effectors
  REGION 1..511: note = Description: MG81-635 effector
MKKSNTDTCCLTLPLKLEKWQEDRLSKRFEIARQIYNTMVHAELKKLRNIENSQPYRQIQKQIEALNWKNQNDKARLKSLYNDRNKLLNTIGFSEYGFKADIKYYYKHFNDNIGSSVAVHGIAPQVWAAFEKMLFHKEGKKVHYKKKDDIHSLHGYSVTGKSGGVGIIFRKTYIEWKGLKLPLKRSPDNAYETEMLGRRVKYVRLLRKPGKRKDCWYAQLSLEGKPAIKRDPESGKRRHSIGRGAVGLDIGPQTLAYSACGAADLVELADQVQNIEQMKRRLQRKLDRSRRATNPDNYADNGTIRRGVKLTHNKSNRYRRTQRELRYLQHCQAEIRKRQHIELANHLLALGDCFYVEDMAWPSLTHRAKETAISEKTGRIKRKKRFGKSVANKAPATLIGILEQKCNSLGLPGVVKVPTSLRASQYNHQSGEYTSKPLSQRWNNMPDGERIQRDLYSAFLLQHYDPKAGNFDSALLQQDYPQFVQYHHRAIQRLSTVPKTLSSMGIQRSLR

SEQ ID NO: 2355 - protein, 511 aa, unidentified
  REGION 1..511: note = Description of Unknown: uncultivated organism sequence
  REGION 1..511: note = Category: MG81 effectors
  REGION 1..511: note = Description: MG81-636 effector
MKKSNTDTCCLTLPLKLEKWQEDRLAKRFEIARQIYNTMVHAELKKLRNIEISQPYRQIQKQIEALNWKNQNDKARLKSLYNDRKKLLNTIGFSEYGFKADIKYYYKHFNDNIGSSVAVHGIAPQVWAAFEKMLFHKEGKKVHYKKKDDIHSLHGYSVTGKSGGVEIIFRKTYIEWKGLKLPLKRSPDNAYETEMLGRRVKYVRLLRKPGKRKDCWYAQLSLEGKPAIKRDPESGKRRHSIGRGAVGLDIGPQTLAYSACGAADLVELADQVQNIEQMKRRLQRKLDRSRRATNPDNYADNGTIRRGVKLTHNKSNRYRRTQRELRYLQHCQAEIRKRQHIELANHLLALGDCFYVEDMAWPSLTHRAKETAISEKTGRIKRKKRFGKSVANKAPATLIGILEQKCNSLGLPGVMKVPTSLRASQYNHQSGEYTSKPLSQRWNNMPDGERIQRDLYSAFLLQHYDPKAGNFDSALLQQDYPQFVQYHHRAIQRLSTVPKTLSSMGIQRSLR

SEQ ID NO: 2356 - protein, 509 aa, unidentified
  REGION 1..509: note = Description of Unknown: uncultivated organism sequence
  REGION 1..509: note = Category: MG81 effectors
  REGION 1..509: note = Description: MG81-637 effector
MRSTTETCCLTLPLVLEKWQSDRLEKRFEIARQIYNTLLNFELKKLRRLEQSEEYVAIQENIQTELQSEKPDQAARTALYRQRDKLRKDAGFTEYAFKTDIKDFYKHFKTNIASSVAVHGIAPQVWAAFDKLFYKNGKAVHFKKRGDLRSVQGYSTKKRSGGTEIIFRGTYVEWNKLKLPVKLDPGNAYETEMLQKFVKYCRILKKPGKKKPRWYVQLMLEGKPAVKREKFTEAIKHPVGSGPVGIDIGPQTIAYAAETETALEELAEGVQNIEREKRLLQRKLDRSRRSTNPDNFQADGTVKRGVKLQWNKSKRYQRIQHELAFLQHQQAELRKRQHIQLANHLLSLGDRFYVEDMDWPALTHRAKDTAISEKTGKFKRKKRFGKSVGNKAPATFLGILNQKLLSRGYPGIVKVPTSVKASQFNHITGDFQKKPLSQRWNDMPDGRRIQRDMYSAFLLQHMNEQNDGFDVDALHRDYQRFLAQHDAMIRELQKKKKTISSMGIARNAS

SEQ ID NO: 2357 - protein, 371 aa, unidentified
  REGION 1..371: note = Description of Unknown: uncultivated organism sequence
  REGION 1..371: note = Category: MG81 effectors
  REGION 1..371: note = Description: MG81-638 effector
MFREDRIIWNQQGNRDRKKVKREFLLKLSPDNPYEAEMLKRHVKFVRILRKDGKTKPHWYAQLVLEGKPAVKRDPISSAPKHPVGHGVVGIDIGTRTLAYSTDKEVNLLELADHVQNIEQEKRRLQRKMDRSRRATNPENYNPDGTFKRGVKLTRNKSKRYRRIQHQLAMIQHHQADIRKQQHNELANYLLTLGDCFFVENMSYCDLVHRANKTEISEKTGRYKRKKRFGKSIANKAPAMLITMLKQKCQSRGLKGVKEVDTHVRASQYNHQTDTCIEKALENRWNVMPDGERIQRDLYSAFLLQHCKQGLPEYNRKELKKEFGEELYRVFDREALQRDYPQFVAYHHMTIQRLSELPHTIPSMGIRRIIS

SEQ ID NO: 2358 - protein, 503 aa, unidentified
  REGION 1..503: note = Description of Unknown: uncultivated organism sequence
  REGION 1..503: note = Category: MG81 effectors
  REGION 1..503: note = Description: MG81-639 effector
MLPDTAFKTGKWQEDRLAKRFEIARQIYNTMVRAELKKLRAMEQSEPYKANQEKIQALDWKTQTDKQALKALYKERDKLLRDGGFSEYGFKSDIKNYYKHFNNNIGSNVAFHGIAPQVWAAFEKMLFKKEGKKVHFKKKGDIHSLRGYSAAGKSGGVEIIFRETYIEWKGLKLPLKLSPDNIYETQMLSYRVKYVRLLRKPGKRKDRWYAQLSLEGKPVIKYNPKTGEVRHPIGKGAVGLDIGPQTLAYSAATGADLVELANQVQNVEQEKRRLQRKLDRSRRATNPGNYADDGTIRRGIALTHNKSKRYLRTQQELKYLQHQQAEIRKRQHTELANHLLSLGDCFYVEKMVWTSLTHRAKETEISEKTGKIKRKKRFGKSVANKAPATLIGILQRKSAALGIPGVIEVPTSVKASQYNHQSGTYTPKPLSQRWNNMPDGERIQRDLYSAFLLQHYDPQTNTFDANSLHQDYPQFVQYHHDAVLRLYAMPKTPSSMGIKRSLR

SEQ ID NO: 2359 - protein, 512 aa, unidentified
  REGION 1..512: note = Description of Unknown: uncultivated organism sequence
  REGION 1..512: note = Category: MG81 effectors
  REGION 1..512: note = Description: MG81-640 effector
MPTKQKEGGNRCVLTLPLLTEPWQEHIIEKRFKIIEHLKNQLISIELRKLKKLQRTKAYKNLIKQIESVPKSERTVLYKERNKMLKDAGFSQYTFMDDMARKKSLMQKHFESHINVQIAHKAAIDVWSSFEKFLFGTGQIVHYQKRGTLSSVASKSPKTGMFYYSDENIFKWSGGGTKPKGGIILCLRVASVKTNYEKEMVANNEIKYYRVVRKWMKTKYKYYLQITFAGKPADKHREISTGRVGIDIGTQTIAIASDKSVKLLELADKVNKNHIKKCELQRKLDRSRRYTNPDNFNPDGTVKRGTKGHKLKWNKSKHYLEVAGKIRELERKNADIRKYQHTCLANDILAMGNQIYIEPMNYKGLQKRAKETQVDEKGRYKKKKRFGKSLANKAPAMFVTILKTKAEQHGGEVYEVDIMSYRASQCDHTTGEYTKHGLNDRWRILGNGDKVQRDLYSAFLIKNSNKTHDEIDLDKCSKTYDSFKKLHDKEIENIRNEVILRKRRNISSYGIA

SEQ ID NO: 2360 - protein, 162 aa, unidentified
  REGION 1..162: note = Description of Unknown: uncultivated organism sequence
  REGION 1..162: note = Category: MG81 effectors
  REGION 1..162: note = Description: MG81-641 effector
MGNQIYIEPMNYKGLQKRVKETQVDEKGRYKKKKRFGKSLANKAPSMFVTILKTTAEQHGGEVYEVDIMSYRASQCDHTTGEYTKHGLNDRWRILGNGDKVQRDLYSAFLIKNSNKTHDEIDLDKCSKTYDNFKKLHDKEIENIRNEVKLRERRNISSYGIA

SEQ ID NO: 2361 - protein, 521 aa, unidentified
  REGION 1..521: note = Description of Unknown: uncultivated organism sequence
  REGION 1..521: note = Category: MG81 effectors
  REGION 1..521: note = Description: MG81-644 effector
MMATWKGGIPVGKSSTDTCCLTLPLKLEKWQEDRLAKRFEIARQIYNTMVRAELKKMDRVKQLPEYRKNQKEIQALDWKNSADKQRLKELYGNQNRILQKQGFTKYGFKSDSKDYYKHFIENIGSSVATHCIAPQVWNAFDKMLFQKDGKVVHFKRYGDVHSLKGGSVTNKSGGAEIMFRKTYIEWKGLKLPLKLSPNNAYEAEMLSYRVKYVRILRTRGKTKDRWYAQFSLEGKPAVKYDSSTGKPVHPVGRGAVGLDIGPQTLAYAAANEANLVELADQVQNIEQEKRRLQRKLDRSRRATNPDNYNENGTIRKGVKLTHNKSKRYCKLQKELSWIQHCQAETRKRQHIALANHLLSLGDCFYVEPMAWPSLTHRAKKTEVSEKTGRIKRKKRFGKSVANKAPASLIGILKLKCISLGLTGVVEVPMLLKASQYNHQSKDYAPKSLSQRWNDMPDGNRIQRDLYSAFLLQHYNSQLENFNQETLERDYPQFVRLHNQTIQRLSALPKTPSSMGIRRSVS

SEQ ID NO: 2362 - protein, 528 aa, unidentified
  REGION 1..528: note = Description of Unknown: uncultivated organism sequence
  REGION 1..528: note = Category: MG81 effectors
  REGION 1..528: note = Description: MG81-645 effector
MAKKNNNNNNTDTCVLTLPLRVEKWQEDCLLKRFEAARRIYNSLLNFELKKLRQLERTVEYRQIQSVISSAYRSNTKDSPECKAALKRREKLIDENGLTKNGFKNDVKFFYKHFDGLIGSSVAVHCIAVQLWAAFNKYLCGNGKEIHFKRLGDISSLKGYSVKGKSGGCEIIFRGQYVEWTRKKKKLLLPLKIDPDNEYEREMLSRRVKYVRIIKKPGKNRLRWYAQLTLEGKPALKYSAETGKPIHSVGKGDVGIDIGPQTVAYASDKEVALLELADRVTNIEHQKKKLQRKLDRSRRATNPDNYKPDGTIKRGVKLTRNKSKRYLKLQSKLAYIQHRQAEIRKLQHTCLANHMLTLGDRFFVEKMNWPGLAHRAKETSISEKTGRYKRKKRFGKSLANKAPAMFISILKQKCETLGLPGVVEVDTFRLKASQYNHLSDTCEKKSLSERWNYMPISDGSDSSKTKRIQRDLYSAFLLQHTIPQSCSFDKEALRIDYPNFVTMHDAEIHRLESLPKTITSMGVRRSHS

SEQ ID NO: 2363 - protein, 365 aa, unidentified
  REGION 1..365: note = Description of Unknown: uncultivated organism sequence
  REGION 1..365: note = Category: MG81 effectors
  REGION 1..365: note = Description: MG81-646 effector
MIEKTNLKTLKVRVKDKHQSILERMAFEVNQVWNAANEITATYSYIPVPEVGWLRNNFSAFDLQKDLKSIKAERGFILHSTTIQEVIAVHYKSRRQFKTDKLRWRVSGGTRRSLGWIPFKSGAAQWKNGQVYFAGHFFKVWDSYGLSQFEFRSGSFSQDSRGRWYFNIVVEAAQIASQATGQVGIDLGLKEVATCSNGLKLESKQFYRQLETKLGVAQRANKKQRVKAIHAKIKNRRLNHIHQFTTRLVKDNALIVVGNVNSSQLAKTKMAKSVLDAGWYILKTQLDYKSKAMQAVFIEVNESYTTQACSCCGSISANSPKGRAGLRIREWSCPECGALHDRDINAAKNILALGHERLAAGIRAL

SEQ ID NO: 2364 - protein, 354 aa, unidentified
  REGION 1..354: note = Description of Unknown: uncultivated organism sequence
  REGION 1..354: note = Category: MG81 effectors
  REGION 1..354: note = Description: MG81-647 effector
MVGHLCRPHRHAPAVERHRAGDLVRVRARLGGERRQERRYKKGIKTRDQSRGWHQAVLMVQRYHREIADARADALHQCSRRIVDMGAETIVMRDNDVAGMLARDAQNTDADRQRRNRIAPLVAQMGGMYELRRQVTYKQQWAGGRVELVPEHEPTTLRCSVCLAVRDTDPGYPEFSCPSCGHVEDREANSARNLLDYVPPPENGSDKNFTGTGNGDGGAGGRAVRQKRGRKPKRMAGGTGPLEAEQSAASPEGGATSVLGPGNHAPDAQAPGVTDAAAASVAAAIQVDGGMVPPPRKRHTTAHERERSSDADPATESSRALGGERATRKRDRSQSVPQRRGSPRDPQEPSGAAA

SEQ ID NO: 2365 - protein, 511 aa, unidentified
  REGION 1..511: note = Description of Unknown: uncultivated organism sequence
  REGION 1..511: note = Category: MG81 effectors
  REGION 1..511: note = Description: MG81-648 effector
MKKSNTDTCCLTLPLKLEKWQEDRLAKRFEIARQIYNTMVHAELKKLRNIENSQPYRQIQKQIEALNWKNQNDKARLKSLYNDRNKLLNTIGFSEYGFKADIKYYYKHFNDNIGSSVAVHGIAPQVWAAFEKMLFHKEGKKVHYKKKDDIHSLHGYSVTGKSGGVEIIFRKTYIEWKGLKLPLKRSPDNAYETEMLDRRVKYVRLLRKPGKRKDCWYVQLSLEGKPAIKRDPESGERRHSIGRGAVGLDIGPQTLAYSACGAADLVELADQVQNIEQMKRRLQRKLDRSRRATNPDNYADNGTIRRGVKLTHNKSNRYRRTQRELRYLQHCQAEIRKRQHIELANHLLALGDCFYVEDMAWPSLTHRAKETAISEKTGRMKRKKRFGKSVANKAPATLIGILEQKCNSLGLPGVVKVPTSLRASQYNHQSGEYTSKPLSQRWNNMPDGERIQRDLYSAFLLQHYDPKAGNFDSALLQQDYPQFVQYHHRAIQRLSTVPKTLSSMGIQRSLR

SEQ ID NO: 2366 - protein, 523 aa, unidentified
  REGION 1..523: note = Description of Unknown: uncultivated organism sequence
  REGION 1..523: note = Category: MG81 effectors
  REGION 1..523: note = Description: MG81-649 effector
MPTKQKEDSNRCVLTLPLLTEPWQEHIIEKRFKIIEHLKNQLISIELRKLKKLQRTKAYKNLIKQIESVPKSERTVLYKKRNKMLKDAGFSQYTFMDDMAGKKSLMQKHFESHINVQIAHKAAIDVWSSFEKFLFGTGQMIHYQKRGTLKSIASKSPKNGMHYFPESNTFKWSGGRQKKIGQKGEQKKVSIKPISLCLRVSPLKTDYEKEMVANNEIKYYRVVRKWMKTKYKYYLQITFAGKPADKHREISTGRVGIDIGTQTIAIASDKSVKLLELADKVNKNHIKKCELQRKLDRSRRYTNPDNFNPDGTVKRGTKGHKLKWNKSKHYIEIAGKIRELERKNADIRKYQHTCLANDILAMGNQIYIEPMNYKGLQKRAKETQVDEKGRYKKKKRFGKSLANKAPAMFVTILKTKAEQHGGEVYEVDIMSYRASQCDHTTGEYTKHSLNDRWRILGNGDKVQRDLYSAFLIKNSNKTHDEIDLDKCSKTYDIFKKLHDKEIENIRNEVKLRERKNISSYGIA

SEQ ID NO: 2367 - protein, 512 aa, unidentified
  REGION 1..512: note = Description of Unknown: uncultivated organism sequence
  REGION 1..512: note = Category: MG81 effectors
  REGION 1..512: note = Description: MG81-650 effector
MPTKQKEDSNRCVLTLPLLTEPWQEHIIEKRFKIIEHLKNQLISIELKKLKNLQRTKAYKNLIKQIESVPKSERTALYKERNKMLKDAGFSQYTFMDDMAGKKSLMQKHFESHINVQIAHKAAIDVWSSFEKFLFGTGQMIHYQKRGTLSSVASKSPKTGMFYYSDENIFKWSGGGTKPKGGIILCLRVASVKTNYEKEMVANNEIKYYRVVRKWMKTKYKYYLQITFAGKPADKHREISTGRVGIEIGTQTIAIASDKSVKLLELADEVNKNHIKKCELQRKLDRSRRYTNPDNFNPDGTVKRGTKGYKLKWNKSKHYIEIAGKIRELERKNADIRKYQHTCLANDILAMGNQIYIEPMNYKGLQKRAKETQVDEKGRYKKKKRFGKSLANKAPAMFVTILKTKAEQHGGEVYEVDIMSYRASQCDHTTGEYTKHGLNDRWRILGNGDKVQRDLYSAFLIKNSNKTHDEIDLDKCSKTYDNFKKLHDKEIENIRNEVILRKRRNISSYGIA

SEQ ID NO: 2368 - protein, 512 aa, unidentified
  REGION 1..512: note = Description of Unknown: uncultivated organism sequence
  REGION 1..512: note = Category: MG81 effectors
  REGION 1..512: note = Description: MG81-651 effector
MKKSNTDTCCLTLPLKLGKWQEDRLAKRFEIARQLYNTLVHAELKRLAQVKQTAEYRENERKIRTLDWNDPGDQAKLKGLYKERRKSLKTAGFTDYSFTTDMGKYYKHFRDNIGSNVALHGIAPQVWAAFDKLLFKKGGKKVHYKKPGEVNSVQGYSRTGKSGGTEIMFREPYIEWKGLKLPLKLSPDNAYETDMLQRRVKLVRLVRRPGKRRDRWYAQLVLEGKPAIKADPVTGKAVHPIGSGPVGLDIGPQTLAYSAAGAAGLVELADRVQNIEQEKRRLQRKMDRSRRAANPDNYAEDGTIRRGVKLTHNKSKRYRRSQQELKYLQHRQAEIRKLQHIQFANHLLSLGDHFYVEKMEWSSLTHRAKETVISEKTGKPRSKRRFGKSIANKAPAMLIEILRQKCKSLGLSDVVEINPADIKASQYNHLTGEYVKKSLSRRWNDMQDGEHLQRDLYSAFLLQHYDSCSKTLDHDSIVRDYPAFVQYHHREIERLHALPKTPSSMGIRRSIA

SEQ ID NO: 2369 - protein, 512 aa, unidentified
  REGION 1..512: note = Description of Unknown: uncultivated organism sequence
  REGION 1..512: note = Category: MG81 effectors
  REGION 1..512: note = Description: MG81-652 effector
MPTKQKEDSNRCVLTLPLLTEPWQEHIIEKRFKIIEHLKNQLISIELRKLKNLQRTKAYKNLIKQIESVPKSERTVLYKERNKMLKDAGFSQYTFMDDMAGKKSLMQKHFESHINVQIAHKAAIDVWSSFEKFLFGTGQIVHYQKRGTLSSVASKSPKTGMFYYSDENIFKWSGGGTKPKGGIILCLRVASVKTNYEKEMVANNEIKYYRVVRKWMKTKYKYYLQITFAGKPADKHREISTGRVGIDIGTQTIAIASDKSVKLLELADKVNKNHIKKCELQRKLDRSRRYTNPDNFNPDGTVKRGTKGHKLKWNKSKHYIEIAGKIRELERKNADIRKYQHTCLANDILAMGNQIYIEPMNYKGLQKRAKETQVDEKGRYKKKKRFGKSLANKAPAMFVTILKTKAEQHGGAVYEVDIMSYRASQCDHTTGEYTKHGLNDRWRILGNGDKVQRDLYSAFLIKNSNKTHDEIDLDKCSKTYDSFKKLHDKEIENIRNEVMLRGRKNISSYGIA

SEQ ID NO: 2370 - protein, 512 aa, unidentified
  REGION 1..512: note = Description of Unknown: uncultivated organism sequence
  REGION 1..512: note = Category: MG81 effectors
  REGION 1..512: note = Description: MG81-653 effector
MPTKQKEDSNRCVLTLPLLTEPWQEHIIEKRFKIIEHLKNQLISIELRKLKNLQRTKAYKNLIKQIESVPKSERTVLYKERNKMLKDAGFSQYTFMDDMAGKKSLMQKHFESHINVQIAHKAAIDVWSSFEKFLFGTGQIVHYQKRGTLSSIASKSPKTGMFYYSDENIFKWSGGGTKPKGGIILCLRVASVKTNYEKEMVANNEIKYYRVVRKWMKTKYKYYLQITFAGKPADKHREISTGRVGIDIGTQTIAIASDKSVKLLELADKVNKNHIKKCELQRKLDRSRRYTNPDNFNPDGTVKRGTKGHKLKWNKSKHYLEIAGKIRELERKNANIRKYQHTCLANDILAMGNQIYIEPMNYKGLQKRAKETQVDEKGRYKKKKRFGKSLANKAPAMFVTILKTKAEQHGGEVYEVDIMSYRASQCDHTTGEYTKHGLNDRWRILGNGDKVQRDLYSAFLIKNSNKTHDEIDLDKCSKTYDSFKKLHDKEIENIRNEVILRKRRNISSYGIA

SEQ ID NO: 2371 - protein, 512 aa, unidentified
  REGION 1..512: note = Description of Unknown: uncultivated organism sequence
  REGION 1..512: note = Category: MG81 effectors
  REGION 1..512: note = Description: MG81-654 effector
MPTKQKEGGNRCVLTLPLLTEPWQEHIIEKRFKIIEHLKNQLISIELRKLKKLQRTKAYKNLIKQIESVPKSERTVLYKERNKMLKDAGFSQYTFMDDMAEKKSLMQKHFESHINVQIAHKAAIDVWSSFEKFLFGTGQIVHYQKRGTLSSVASKSPKTGMFYYSDENIFKWSGGGTKPKGGIILCLRVASVKTNYEKEMVANNEIKYYRVVRKWMKTKYKYYLQITFAGKPADKHREISTGRVGIDIGTQTIAIASDKSVKLLELADKVNKNHIKKCELQRKLDRSRRYTNPDNFNPDGTVKRGTKGHKLKWNKSKHYLEVAGKIRELERKNADIRKYQHTCLANDILAMGNQIYIEPMNYKGLQKRAKETQVDEKGRYKKKKRFGKSLANKAPAMFVTILKTKAEQHGGEVYEVDIMSYRASQCDHTTGEYTKHGLNDRWRILGNGDKVQRDLYSAFLIKNSNKTHDEIDLDKCSKTYDSFKKLHDKEIENIRNEVILRKRRNISSYGIA

SEQ ID NO: 2372 - protein, 512 aa, unidentified
  REGION 1..512: note = Description of Unknown: uncultivated organism sequence
  REGION 1..512: note = Category: MG81 effectors
  REGION 1..512: note = Description: MG81-655 effector
MPTKQKEGGNRCVLTLPLLTEPWQEHIIEKRFKIIEHLKNQLISIELRKLKNLQRTKAYKNLIKQIESVPKSERTVLYKERNKMLKDAGFSQYTFMDDMAGKKSLMQKHFESHINVQIAHKAAIDVWSSFEKFLFGTGQIVHYQKRGTLSSVASKSPKTGMFYYSDENIFKWSGGGTKPKGGIILCLRVASVKTNYEKEMVANNEIKYYRVVRKWMKTKYKYYLQITFAGKPADKHREISTGRVGIDIGTQTIAIASDKSVKLLELADKVNKNHIKKCELQRKLDRSRRYTNPDNFNPDGTVKRGTKAHKLKWNKSKHYIEIAGKIRELERKNADIRKYQHTCLANDILAMGNQIYIEPMNYKGLQKRAKETQVDEKGRYKKKKRFGKSLANKAPAMFVTILKTKAEQHGGEVYEVDIMSYRASQCDHTTGEYTKHGLNDRWRILGNGDKVQRDLYSAFLIKNSNKTHDEIDLEKCSKTYDNFKKLHDKEIENIRNEVILRKRRNISSYGIA

SEQ ID NO: 2373 - protein, 511 aa, unidentified
  REGION 1..511: note = Description of Unknown: uncultivated organism sequence
  REGION 1..511: note = Category: MG81 effectors
  REGION 1..511: note = Description: MG81-656 effector
MGKSSTDTCCLTLPLKLEKWQEDRLAKRFEIARQIYNTMVRAELKRLRQVEQSPQYRSNKKAIQALDWKNTADKPKLKTLYRERDKLLKGGGFTEYGFKSDIKNFYKHFAENIGSSVAVHGIAPQVWAAFERVLFKKEGKKVHFKKTGDIRSLRGYSVTGKSGGVEIIFRGSYIEWKGLNLPLKLSPDNAYETEMLSYRVKYVRILRKPGKTRDRWYAQLSLEGKPAIKRNPASGNPVHPVGQGAVGLDIGPQTLAYAAEKEANLVELADRVQNIEREKHLLQRKMDRSRRAANPDNYAENGTIRRGVKLTHNKSKRYLRLQRELCYLQHCQAETRKRQHTELANHLLSLGSCFYVEDMAWPSLTHRAKKTEISDKTGRIKRKKRFGKSIANKAPAALINILRTKCVSLGIPGVVEVPTSLKASQYNHQSKEYTPKPLSQRWNDMPDGSRIQRDLYSAFLLQHYDPQSGNFDQASLEADYPQFVQLHNQSIQRLLTVPKAPSSMGIRRSVS

SEQ ID NO: 2374 - protein, 512 aa, unidentified
  REGION 1..512: note = Description of Unknown: uncultivated organism sequence
  REGION 1..512: note = Category: MG81 effectors
  REGION 1..512: note = Description: MG81-657 effector
MPTKQKEDSNRCVLTLPLLTEPWQEHIIEKRFKIIEHLKNQLISIELRKLKNLQRTKAYKNLTKQIESVPKSERTALYKERNKMLKDAGFSQYTFMDDMAGKKSLMQKHFESHINVQIAHKVAIDVWSSFEKFLFGTGQIVHYQKRGTLSSVASKSPKTGMFYYSDENIFKWSGGGTKPKGGIILCLRVASVKTNYEKEMVANNEIKYYRVVRKWMKTKYKYYLQITFAGKPADKHREISTGRVGIDIGTQTIAIASDKSVKLLELADKVNKNHIKKCELQRKLDRSRRYTNPDNFNPDGTVKRGTKGHKLKWNKSKHYIEIAGKIRELERKNADIRKYQHTCLANDILAMGNQIYIEPMNYKGLQKRVKETQVDEKGRYKKKKRFGKSLANKAPAMFVTILKTKAEQHGGEVYDVDIMSYRASQCDHTTGEYTKHGLNDRWRILGNGDKVQRDLYSAFLIKNSNKTHDEIDLDKCSKTYDNFKKLHDKEIENIRNEVKLRERKNISSYGIA

SEQ ID NO: 2375 - protein, 341 aa, unidentified
  REGION 1..341: note = Description of Unknown: uncultivated organism sequence
  REGION 1..341: note = Category: MG81 effectors
  REGION 1..341: note = Description: MG81-658 effector
MVGRRNKTKGWYYSLLAVASVKTNYEKEMVANNEIKYYRVVRKWMKTKYKYYLQITFAGKPADKHREISTGRVGIDIGTQTIAIASDKSVKLLELADKVNKNHIKKCELQRKLDRSRRYTNPDNFNPDGTVRRGTKGHKLKWNKSKHYIEIAGKIRELERKNSDIRKYQHTCLANDILAMGNQIYIEPMNYKGLQKRAKETQVDEKGRYKKKKRFGKSLANKAPSMFVTILKTKAEQHGGEVYEVDIMSYRASQCDHTTGEYTKHGLNDRWRILGNGDKVQRDLYSAFLIKNSNKTHDEIDLDKCSKTYDNFKKLHDTEIENIRNEVKLRERKNISSYGIA

SEQ ID NO: 2376 - protein, 360 aa, unidentified
  REGION 1..360: note = Description of Unknown: uncultivated organism sequence
  REGION 1..360: note = Category: MG81 effectors
  REGION 1..360: note = Description: MG81-659 effector
MFTYRYRIRDSSSKVRLKKLASSVNFVWNYVNKLSFENIKQHGRFLSTYDVNYYLNGCSKGLEIGSSSIQEIARFYVQTRQQFKKRKLSWRSAKRSLGWVPLRHDGFKLKNDTVRYCGHDFKLWKHRELPQGAKIKTGSFVQDARDRWYLNVSFEVPDVEVHALPRTEVGIDLGIKNQLTLSTGENFTRGSETKKFAVDLAHAQRARKKKRMKAVSAKAANRRSDWTHKVTTDIVRRFATVFVGDLKTSELVAKSSLSNFSSLYDASIGSIKHCLKYKAKKLGGACYVVNEAYTSVTCYFCEARSGPTGKGGLAIREWTCQSCGAVHHRDVNAARNILRRGHSTLQRSLIGGDATLSTSA

SEQ ID NO: 2377 - protein, 511 aa, unidentified
  REGION 1..511: note = Description of Unknown: uncultivated organism sequence
  REGION 1..511: note = Category: MG81 effectors
  REGION 1..511: note = Description: MG81-660 effector
MAKCSTDTCCLTLPLRLEKWQEDRLAKRFEIARQIYNTMVRAELKKLRAMEQSEPYKANQEKIQALDRKTQTDKQALKALYKERDKLLRDGGFSEYGFKSDIKNYYKHFNNNIGSNVAFHGIAPQVWAAFEKMLFKKEGKKVHFKKKGDIHSLRGYSAAGKSGGVEIIFRETYIEWKGLKLPLKLSPDNIYETQMLSYRVKYVRLLRKPGKRKDRWYAQLSLEGKPVIKYNPKTGEVRHPIGKGAVGLDIGPQTLAYSAATGADLVELANQVQNVEQEKRRLQRKLDRSRRATNPGNYADDGTIRRGIALTHNKSKRYLRTQQELKYLQHQQAEIRKRQHTELANHLLSLGDCFYVEKMVWTSLTHRAKETEISEKTGKIKRKKRFGKSVANKAPATLIGILQRKSAALGIPGVIEVPTSVKASQYNHQSGTYTPKPLSQRWNNMPDGERIQRDLYSAFLLQHYDPQTNTFDANSLHQDYPQFVQYHHDAVLRLYAMPKTPSSMGIKRSLR

SEQ ID NO: 2378 - protein, 512 aa, unidentified
  REGION 1..512: note = Description of Unknown: uncultivated organism sequence
  REGION 1..512: note = Category: MG81 effectors
  REGION 1..512: note = Description: MG81-661 effector
MPTKQKEGGNRCVLTLPLLTEPWQEHIIEKRFKIIEHLKNQLISIELRKLKNLQRTKAYKNLIKQIESVPKSERTALYKERNKMLKDAGFSQYTFMDDMAGKKSLMQKHFESHINVQIAHKAAIDVWSSFEKFLFGTGQIVHYQKRGTLSSVASKSPKTGMFYYPDENIFKWSGGGTKPKGGIILCLRVASVKTNYEKEMVANNEIKYYRVVRKWMKTKYKYYLQITFAGKPADKHREISTGRVGIDIGTQTIAIASDKSVKLLELADKVNKNHIKKCELQRKLDRSRRYTNPDNFNPDGTVKRGTKGHKLKWNKSKHYIEIAGKIRELERKNADIRKYQHTCLANDILAMGNQIYIEPMNYKGLQKRAKETQVDEKGRYKKKKRFGKSLANKAPAMFVTILKTKAEQHGGEVYEVDIMSYRASQCDHTTGEYAKHGLNDRWRILGNGDKVQRDLYSAFLIKNSNKTHDEIDLDKCSKTYDNFKKLHDKEIENIRNEVILRKRRNISSYGIA

SEQ ID NO: 2379 - protein, 578 aa, unidentified
  REGION 1..578: note = Description of Unknown: uncultivated organism sequence
  REGION 1..578: note = Category: MG81 effectors
  REGION 1..578: note = Description: MG81-662 effector
MAFGSKNSTPSFVLTLPMVIGLNEQDLLYKEFKKCGIIYNQLVSVTTKMWHQLRKTRKYRELMAAIAKATPDSDEQKALFKRREKMLKEYRFSEDAFHAMVVPYAKHYAINSHVAQSVATAVWAAWSSFFFDNGKEVHYKKLEQVSSIFGKNNATGIILRPANCTTSVINSAKKKIKNSIEEKYFAAYRKPDAKEDEEVALPDEVKTQMEKEIAAATAKVKTSIGKGELRIVYGDYTFPLTLRNPNTQTGWYQQEALKCGVKYCRIIRKWVGTKWKYYAQIVLEGYPPIKCDSNGVAKHSVKQGRVGIDIGTQTIAFSGKDVCDLRVLAPSARAQAKSLVNEIAATLRAMDRSRRATNPKYYNPDGTIKRLKRQHGQKQRREWKYSKRYYRLRAKLRNLYRKLADIRKMEHNILANELLAHGNEFVVEDMNYKALQKRSKETKINPKTGRTHTKKRFGKSLSRCAPATFISILSKKANRYGGTVIKVSTFETKASQFDHTDESYTKKKLSERMARLRSGDIVQRDLYSAFLLEHIDTESLQYNMETLNSAFPAFLEMHENTKQRLQAVGSSLPASIGF

SEQ ID NO: 2380 - protein, 578 aa, unidentified
  REGION 1..578: note = Description of Unknown: uncultivated organism sequence
  REGION 1..578: note = Category: MG81 effectors
  REGION 1..578: note = Description: MG81-663 effector
MAFGSKNSTPSFVLTLPLDINLNEQDYLYKEFKKCGIIYNQLVSVTIKMWHQLRKTRKYRELMAAIAKSASDSDEQKTLYKQREKILKEHHFSEDSFHKLVVPYAKHYAIHSHVAQAIATDVWKAWKSFFFSKGKEVHYKRLDDVSSISGKNNATGIVLRPAKLTTSNLASAKRKVQKTVEQRYYKAYGQSDPKDDKKVILPDSVIPQMEAEIAVAVAKVKPAVGNGSLRIVYGKHEFPVVVRNSNTQTGKYQQEALKCGVKFCRITRKWVKIKWKYYAQLVLEGYPPTKCDSNGVIKHPIKQGCVGLDIGTQTLAISGSDICDLRLLAPSARAQAKGLVNEIARTQRAMDRSRRATNPDCYNPDGTIKRLKCQHGHKQKRDWKYSKRYYRLRARLRDLNRRLADIRKMEHNILANELLEHGNEFIVEDMNYKALQKRSKETKVNAKTGRIHTKKRFGKSLSRCAPAMFITILTNKVTRYGGKVIKVSTFETKASQFDHTDESYTKKKLSERMAHLSSGEVVQRDLYSAFLLEHIDTESLEYNTEALKSAFPAFLKMHENTKKHLQKEENNLPASVGF

SEQ ID NO: 2381 - protein, 578 aa, unidentified
  REGION 1..578: note = Description of Unknown: uncultivated organism sequence
  REGION 1..578: note = Category: MG81 effectors
  REGION 1..578: note = Description: MG81-664 effector
MAFGSKNSMPSFVLTLPLDISLNEQDYLYKEFKKCGVIYNQLVSATTKMWHQLRKTRKYRELMAAIAKATPDSDEQKTLFKQREKMLKEYRFSEDAFHKLVVPYAKHYAINSHIAQAVASNVWKAWSTFFFSKGKEVHYKRLDDLAAISGKNNFTGFVLRPANLTTSNIESAKRKAQKAVEKRYDDMYGRPDPKDDKKVVLPDEVKPQMEAEIAAAIAKIKPTIGEGNLRIVYGKHEFPVVLRNPKTQTGKYQQEALKCGVKYCRITRKWVKNKWKYYAQFILEGYPPTKCDGNGVMKHPVNQGRIGLDIGTQTLAVSGNDICDLRVLAPSARAQARGLTNEIARTTRAMNRSRRATNPQYFNSDGTIKRLKRQHGHKQKRDWKYSKRYFRLKAKLRDLNRRLADIRKMEHNILANELLEHGNEFVIEDMNYKTLQKRSKETKINAKTGRTHTKKRFGKSLSRCAPAKFITILTNKAVRNGGSVIKVSTFETKASQFDHTDESYTKKKLSERMARLRSGDIVQRDLYSAFLLEYIDTESLEYNTKALNSAFPAFLVMHENTKKRLQKDKSYLPASVGF

SEQ ID NO: 2382 - protein, 578 aa, unidentified
  REGION 1..578: note = Description of Unknown: uncultivated organism sequence
  REGION 1..578: note = Category: MG81 effectors
  REGION 1..578: note = Description: MG81-665 effector
MAFGSKNSTPSFVLTLPLNISLNEQDYLYKEFKKCGVIYNQLVSVTTKMWHQLRKTRKYRDLMTAIAKAVPDSEEQKALLKQRQKKIQETGFSEGAFHKMVEPYAKHFAINSHVAQNVASAVWTAWEGFFFSKGKAVHYKKLEDVTSISGKNNATGIVLRPANLTTSNIESAKRKAQKAVEKRYDDMYGRPDPKDDKKVVLPDEVKPQMKAEIAAAIAKIKPTIGKGNLRIVYGKHEFPVVLRNPKTQTGKYQQEALKCGVKYCRITRKWVKTKWKYYAQFILEGYPPTKCDGNGVMKHPVNHGRIGLDIGTQTLAISGKDICDLRVLAPSARAQARGLTNEIARTTRAMNRSRRATNPKYYNSDGTIKRLKRKHGHKQRRDWKYSKRYFRLKAKLRDLNRRLADIRKMEHNILANELLQHGNEFVVEDMNYKALQKRSKETKVNPKTGRAHTKKRFGKSLSRCAPAMFISILNKKANRYGGSVIKVDTFETKASQFDHTDESYTKKRLSERMAHLSSGEVVQRDLYSAFLLEHIDIESLQYNMETLNSAFPAFLEMHENTKRRLQAVGSSLPASIGF

SEQ ID NO: 2383 - protein, 578 aa, unidentified
  REGION 1..578: note = Description of Unknown: uncultivated organism sequence
  REGION 1..578: note = Category: MG81 effectors
  REGION 1..578: note = Description: MG81-666 effector
MAFGSKNSTPSFVLTLPMVIGLNEQDLLYKEFKKCGIIYNQLVSVTTKMWHQLRKTRKYRELMAAIAKATPDSDEQKALFKRREKMLKEYRFSEDAFHAMVVPYAKHYAINSHIAQAVASDVWKAWSTFFFSKGKEVHYKRLDDLAAISGKNNSTGIVLRPANLTTNNIESAKRKAQKAVEERYDDMYGRSDPKDDKKVVLPDDVKPQMEAEIAAATAKVKTSIGKGELRIVYGDYTFPLTLRNPNTQTGWYQQEALKCGVKYCRIIRKWVGTKWKYYAQIVLEGYPPIKCDSNGVAKHSVKQGRVGIDIGTQTIAFSGKDVCDLRVLAPSARAQAKSLVNEIAATLRAMDRSRRATNPKYYNPDGTIKRLKRQHGQKQRREWKYSKRYYRLRAKLRNLYRKLADIRKMEHNILANELLAHGNEFVVEDMNYKALQKRSKETKINPKTGRAHTKKRFGKSLSRCAPATFISILSKKANRYGGTVIKVSTFETKASQFDHTDESYTKKKLSERMARLRSGDIVQRDLYSAFLLEHIDTESLQYNMETLNSAFPAFLEMHENTKQRLQAVGSSLPASIGF

SEQ ID NO: 2384 - protein, 578 aa, unidentified
  REGION 1..578: note = Description of Unknown: uncultivated organism sequence
  REGION 1..578: note = Category: MG81 effectors
  REGION 1..578: note = Description: MG81-667 effector
MAFGSKNSTPSFVLTLPMVISLNEQDLLYKEFKKCGIIYNQLVCITTKMWHQLRKTRKYRELMADIAKAAPDSDEQKALLKQREKMLKEYRFSENAFHAMVVPYAKHYALHSHVAQMVATAVWAAWSSFFFDNGKEVHYKKLEQVFSISGKNNTTGIMLRPANHTTSVINSAKKKIKGSIEEKYFAAYRKPDAKEGEEVVLPDEVKTQMEKEIAAATAKVKTSIGKGELRLVYGDYTFPLTLRNPDTQAGWYQQEALKCGVKYCRIIRKWVGTKWKYYAQIVLEGYPPIKCDSNGVAKHPVKQGRVGIDIGTQTIAFSCKDVCDLRVLAPSARAQAKSLVNEIAATLRAMNRSRRATNPKYYNPDGTIKRLKRQHGQKQKREWKYSKRYYRLRAKLRNLYRKLADIRKMEHNILANELLAHGNKFVVEDMNYKALQKRSKETKINPKTGRAHTKKRFGKSLSRCAPAMFISILSNKANRYGGSVIKVSTFETKASQFDHTDNSYTKKKLSERMARLRSGDIVQRDLYSAFLLEHIDIESLQYNMETLNSAFPAFLGMHENTKQRLQAVGSSLPASIGF

SEQ ID NO: 2385 - protein, 358 aa, unidentified
  REGION 1..358: note = Description of Unknown: uncultivated organism sequence
  REGION 1..358: note = Category: MG81 effectors
  REGION 1..358: note = Description: MG81-668 effector
MVKTFSFRIKDSTSAKHLYAMARAVNFVWNYCNEVQKKAANSHRPWVNWVMLNNLTSGCSKELRLHSQTIQAIDECYATSLKEAKSPTGKKKRFLRFRGRRSQGWIPFKASGIKLRKDSVVYQGRIFRFWKTRSIPEQIKGGNFSCDVRGRWYLNLVCEYEEALVSNEGSVGIDLGLKSLATLSNGKKYDAQKFFRKYERKLAHHQRCNNARQVRTIHAKIANSRKDFNHKVSHELTRDFNKVFIGDVDSLGLLKTRLAKSVSDASWGQLRTFIEYKAIARGGTYYVVDENNTTRTCSACGCLTGPSGLAGLRVREWQCKECGTVHDRDTNSAINIEQRGLSTLHSPLRTLSAKEEIP

SEQ ID NO: 2386 - protein, 512 aa, unidentified
  REGION 1..512: note = Description of Unknown: uncultivated organism sequence
  REGION 1..512: note = Category: MG81 effectors
  REGION 1..512: note = Description: MG81-669 effector
MPTKQKEDSNRCVLTLPLLTEPWQEHIIEKRFKIIEHLKNQLISIELRKLKKLQRTKAYKNLIKQIESVPKSERTVLYKKRNKMLKDAGFSQYTFMDDMAGKKSLMQKHFESHINVQIAHKAAIDVWSSFEKFLFGSGQMIHYQKRGTLSSVASKSPKTGMFYYSDENIFKWSGGGTKPKGGIILCLRVAPVKTNYEKEMVANNEIKYYRVVRKWMKTKYKYYLQITFAGKPADKHHEVSTDRVGIDIGTQTIAIASDKSVKLLELADKVNKNHIKKCELQRKLDRSRRYTNPDNFNPDGTVKRGTKGHKLKWNKSKHYIEIAGKIRELERKNADIRKYQHTCLANDILAMGNQIYIEPMNYKGLQKRAKETQVDEKGRYKKKKRFGKSLANKAPAMFVTILKTKAEQHGGEVYEVDIMSYRASQCDHTTGEYTKHGLNDRWRILGNGDKVQRDLYSAFLIKNSNKTHDEIDLDKCSKTYDNFKKLHDKEIENIRNEVILRKRRNISSYGIA

SEQ ID NO: 2387 - protein, 401 aa, unidentified
  REGION 1..401: note = Description of Unknown: uncultivated organism sequence
  REGION 1..401: note = Category: MG81 effectors
  REGION 1..401: note = Description: MG81-670 effector
MPTKQKEGGNRCVLTLPLLTEPWQEHIIEKRFKIIEHLKNQLISIELRKLKKLQRTKAYKNLIKQIESVPKSERTVLYKERNKMLKDAGFSQYTFMDDMAGKKSLMQKHFESHINVQIAHKAAIDVWSSFEKFLFGTGQIVHYQKRGTLSSVASKSPKTGMFYYSDENIFKWSGGGTKPKGGIILCLRVASVKTNYEKEMVANNEIKYYRVVRKWMKTKYKYYLQITFAGKPADKHREISTGRVGIDIGTQTIAIASDKSVKLLELADKVNKNHIKKCELQRKLDRSRRYTNPDNFNPDGTVKRGTKGHKLKWNKSKHYLEVAGKIRELERKNADIRKYQHTCLANDILAMGNQIYIEPMNYKGLQKRLKKRKLTKKADIKRKSVLENLLPIKRRQCLLQF

SEQ ID NO: 2388 - protein, 116 aa, unidentified
  REGION 1..116: note = Description of Unknown: uncultivated organism sequence
  REGION 1..116: note = Category: MG81 effectors
  REGION 1..116: note = Description: MG81-671 effector
MFVTILKTKAEQHGGEVYEVDIMSYRASQCDHTTGEYTKHGLNDRWRILGNGDKVQRDLYSAFLIKNSNKTHDEIDLDKCSKTYDSFKKLHDKEIENIRNEVILRKRRNISSYGIA

SEQ ID NO: 2389 - protein, 1268 aa, unidentified
  REGION 1..1268: note = Description of Unknown: uncultivated organism sequence
  REGION 1..1268: note = Category: MG81 effectors
  REGION 1..1268: note = Description: MG81-672 effector
MKVSKVKHRRTAVSVNKKNNTVKGILYDDPIKKDSKGDGASAYVSTKYVVDDVVRNSSRLYSPFNSKKLIIDDKTKVVANSLRQHFKNFVKIYLNCESIDEQQMKFTPDNKYLMDNRVRISLPSDVNEEKLVEAIVNSSLRKSLNKKCNIQIKAGLRETFDIPELIKKAIKIYCIDEKRNLNDAEKLDMYALFSFMYEDKYKNRQKKLIINSISNQVTKVKVCENGNRLLKLSIADTKKKPLWDFMIEYSNSDKKKQDTMLRNIRKSIVLFVCGVENYKNIENDNKLDICSWDGYDINENQQFVCVNTNNSNDDYFISSTELRRANLDHYMKAVAKLNDDRNKFWFQHFESVIETFFSKKAKRNIERIKSAYLCEYLWRDFCSYVALKYVDLGKGVYHFTMADKLALINRNKYEKSIIFGEIESRYNNGISSFDYERIKAEELFERNISTYTTFATNIFSKAVVQDDYIKNHNKASDVLQYSDKEFSDSKVLRNDAMKRILQYWGGQSRWNNTLNKINVDTLCIDIKEHLSNIRNSSVHYTSKVSLSGDKNESIVYMLFKKDFAEIRNIFASKYYSNNVWMFYSIEKINGLMEYLYGDNSTVIDAQIPAYNNIIKRKNIADVIEKIIKKNSYKTINELELIKKYRACLYFILKEIYYNRFIKQENLKEQFIQFVDNDNNLLDDNKNAVESFRRRIHDIDNSLMSFGEMCQFIMTDYNMQNQGNKSIKSKDRQNEDKKKGIDGSYKHFPLLLYHVIKELFLKYIKTDEKIVFIREPANIGSVKTQDEFETHISTLGLYKTLKEKVDSNMSLLDWYTLSHFLMPKQLNYLIGDIKNYIQYLRNIDKRAESVGNNKAYDIDGKINNYYDIVYVLDFSLQYIGRISNEITDYFADEDEYALFMSQFVDFSSDNIVGLKTFCNEKTSNGKHTIGLYCDGANPIMNRNIAYAKMYSNDKILSRTYSKVTIKEIERYYRIQDDLKNVFENGVCKNKDQQKELCDFQKIKNHIELTEISIYTNILNDFMSQFISWSYLRERDLMYFQLGMHYLRLYYGTNELETKYNKLVGESVNIEKGALLYQIAAMYTYKLPIYKVDKNGSAVLAEKQGGTGASVTSFVTEYCKENMRDAIIYEKGLELFEDVKQHKKWSDFRNDIAHMRYISDRDKSIMDIISEIYGGFFTYDIKLKKSIPVIFKNILMRYAVDANLNFLHKENRKLKDTLINIRADKGLVSDKYTYKIGEKDTVDIEVRNDKFLLQLRKLLEYKIRVNGNVL

SEQ ID NO: 2390 - protein, 352 aa, unidentified
  REGION 1..352: note = Description of Unknown: uncultivated organism sequence
  REGION 1..352: note = Category: MG81 effectors
  REGION 1..352: note = Description: MG81-673 effector
MKHTKTLQVRVRDKHTQLLRQMARQVNFVWNYLNELSHRSIRERGVFLSAYDLDRYTQGASKELGLHSQTLQEVSREYATRRRQFKKARLSWRKSIGVRRSLGWIPFKSGAASWKNGQVFHNGRCFKVWDSYGLGQYRLRSGSFSEDARGRWYFNVVVELETQLSTGQGAVGIDLGLKDVATCSDGQRLENGRFYRDLEPKLASAQRAGKKARVRAIHAKIANRRKDALHKFSRSLVERCNTIIVGDVSPQKLVRTRMAKSVLDAGWGQLKTMLAYKCAHAGIVFRVVNEAYTTQTCSCCGALPASRPRGIAGLGIREWICECGVTHDRDVNAARNILALGHERPGEGIPGV

SEQ ID NO: 2391 - protein, 512 aa, unidentified
  REGION 1..512: note = Description of Unknown: uncultivated organism sequence
  REGION 1..512: note = Category: MG81 effectors
  REGION 1..512: note = Description: MG81-674 effector
MPTKQKEDSNRCVLTLPLLTEPWQEHIIEKRFKIIEHLKNQLISIELRKLKKLQRTKAYKNLIKQIESVPKSERTALYKERNKMLKDAGFSQYTFMDDMAGKKSLMQKHFESHINVQIAHKAAIDVWSSFEKFLFGTGQIVHYQKRGTLSSVASKSPKTGMFYYSDENIFKWSGGGTKPKGGIILCLRVASVKTNYEKEMVANNEIKYYRVVRKWMKTKYKYYLQITFAGKPADKHREISTGRVGIDIGTQTIAIASDKSVKLLELADKVNKNHIKKCELQRKLDRSRRYTNPDNFNPDGTVKRGTKGHKLKWNKSKHYIEIAGKIRELERKNADIRRYQHTCLANDILAMGNQIYIEPMNYKGLQKRAKETQVDEKGRYKKKKRFGKSLANKAPAMFVTILKTKAEQHGGEVYEVDIMSYRASQCDHTTGEYTKHGLNDRWRILGNGDKVQRDLYSAFLIKNSNKTHDEIDLDKCSKTYDNFKKLHDTEIENIRNEVKLRERKNISSYGIA

SEQ ID NO: 2392 - protein, 512 aa, unidentified
  REGION 1..512: note = Description of Unknown: uncultivated organism sequence
  REGION 1..512: note = Category: MG81 effectors
  REGION 1..512: note = Description: MG81-675 effector
MPTKQKEDSNRCVLTLPLLTEPWQEHIIEKRFKIIEHLKNQLISIELRKLKKLQRTKAYKNLIKQIESVPKSERTALYKERNKMLKDAGFSQYTFMDDMAGKKSLMQKHFESHINVQIAHKAAIDVWSSFEKFLFGTGQIVHYQKRGTLSSVASKSPKTGMFYYSDENIFKWSGGGTKPKGGIILCLRVASVKTNYEKEMVANNEIKYYRVVRKWMKTKYKYYLQITFAGKPADKHREISTGRVGIDIGTQTIAIASDKSVKLLELADKVNKNHIKKCELQRKLDRSRRYTNPDNFNPDGTVKRGTKGHKLKWNKSKHYIEIAGKIRELERKNADIRKYQHTCLANDILAMGNQIYIEPMNYKGLQKRAKETQVDEKGRYKKKKRFGKSLANKAPAMFVTILKTKAEQHGGEVYEVDIMSYRASQCDHTTGEYTKHGLNDRWRILGNGDKVQRDLYSAFLIKNSNKTHDEIDLDKCSKTYDNFKKLHDKEIENIRNEVILRKRRNISSYGIA

SEQ ID NO: 2393 - protein, 352 aa, unidentified
  REGION 1..352: note = Description of Unknown: uncultivated organism sequence
  REGION 1..352: note = Category: MG81 effectors
  REGION 1..352: note = Description: MG81-676 effector
MKTLKLRIKDKNLKVLDQLASEVNFVWNYVNDLGFKYLKRTGEFLSSYDIDKYTKGASKECGLHSQTIQAISAELVTRRKQFKKAKLKWRVSNKKSARRSLGWIPFKKVAIKYADGYVQYGKHQFKLWDSYGLSKYNVKTGSFVEDSRGRWYVCLVVDNATTIKSKGKTSIGIDLGLKDLATCSDGLKLKAPKIYREYEQKLGIAQRAKNKNRVRSVHAKIKNIRQNMLHQFTRKLVNEHAMIIVGNVNAKALAQTKLAKSVLDASWTTLRTMLKYKCENARVLFEEVNEAYTTQTCSCCGSRLSSPKGRTGLRIREWQCMECGTLHDRDINSALNILALGHERLAVGIPVL

SEQ ID NO: 2394 - protein, 513 aa, unidentified
  REGION 1..513: note = Description of Unknown: uncultivated organism sequence
  REGION 1..513: note = Category: MG81 effectors
  REGION 1..513: note = Description: MG81-677 effector
MPYGQKSKTDTFILTLPLITNSHDEAVLYSNFEKYCKAYNWLVQKTTEMWHQVRKTRRYRELVSAIANTAPKSKERKALYKKRTELLESYGFTSVLFEKKLKAYAKYYHLHSAISQKIAARVWDAWYKFFYKNGKSVHYKKLDDFVSFAAKTNGTGIQFLDDNGLYIKFRGRCIPVKLRKGNTAWYQQEALKRKVKFCIIKREMIRGRWRYFVQLALDGYPPIKCDGNGVAKHPVEPGHIGIDIGTQTIAFSGKDVCDLRVLAPSAIAEARNGLTKEIARIMRQMDRSRRAMNPQYFNENGTVKRLKRKNGHKQIRHWNYSKNYYRLLHRLRDLNRKLAAVRKTEHYILANEMLTYGNEFYVEDMNYKALQKRSKKTKINPKTGRAYTKKRFGKSIGRCAPALFITILGQKASRYGGSVIKVSTFETKASQFDHTDDSYTKKKLSQRFAKLSNGTVVQRDMYSAFLLTHLDESLQGYDKEAIDKDFQQFMKLHNETKERLQNSHEWLPASVGF

SEQ ID NO: 2395 - protein, 386 aa, unidentified
  REGION 1..386: note = Description of Unknown: uncultivated organism sequence
  REGION 1..386: note = Category: MG81 effectors
  REGION 1..386: note = Description: MG81-678 effector
MAGDIPPNNDDQLNINTLYVHTTMNIQIKTLSVRIKDKHAAVLRQMAFEVNQIFNLANEITSAAYSNAGFFGAQKPQWLSAFDVQKPLLKERKERGYTIPSHTVQEIAAIHGKARKQFKRSRLRWRVSGGSRRSLGWVPFKIGSAVWKNGAVRFAGRIFNVWDSYGLGGFKFRAGSFSEDSRGRWYFNVCVEVETVPSTATSAVGIDLGLKDYATPSEGDPLIAGRFYRDLEPALGKAQRANKKARVRAIHAKIKNRRKDALHKYSTALVSSHAAIFVGDASSKKLVKTKMAKSILDAGWFMLKTQLEYKAIARSVVFEVVNESYSTQACSCCGAISSNSPKGRAGLRIREWTCCECGTTHDRDVNAAKNILAAGHRRLAVGIPFL

SEQ ID NO: 2396 - protein, 578 aa, unidentified
  REGION 1..578: note = Description of Unknown: uncultivated organism sequence
  REGION 1..578: note = Category: MG81 effectors
  REGION 1..578: note = Description: MG81-679 effector
MAFGRKESTPSFVLTLPLDINLNEQNYLYKEFKKCGTIYNQLVSATTKMWHQLHKTHEYRALMAAITKAAPDSKELKALLNQRQNMIHQFGFSEGAFHKMVAPYAKHFAINSHVAQKIASAVWTAWKNFFFSKGKVVHYKKLENVTSISGNNNATDIALRPANLTTSIIKSTKDKKKKAIEQRYYKAYGQPDPKDDKNVILPDAVIPQMEVDIVAAVAKVKLSIGEGSLRIVYSDHEFPVVVRNPNTQTGRYQQEALKCGVKYCRITRKWVRNKWKYYAQLVLEGYPPVKCDSNGVMRHPVNQGRVGLDIGTQALAISGSDICDLRVLAPSARAQAKSLVNEIACTMRAMDRSRRATNPKYYNPDGTIKRLKRKHGQKQKRDWKYSKHYYRLRAKLRDLNRRLADIRKMEHNALANELLQHGNEFIVEDMDYKALQKRSKKTKINAKTGRAHTKKRFGKSLSRCAPAKFITILTNKAVRNGGNVIKVDTFETKASQFDHTDESYTKKKLSERMAHLSSGEVVQRDLYSAFLLEHIDTETLKYDIEALKAAFPAFLKMHENTKERLQEAESYLPASVGF

SEQ ID NO: 2397 - protein, 578 aa, unidentified
  REGION 1..578: note = Description of Unknown: uncultivated organism sequence
  REGION 1..578: note = Category: MG81 effectors
  REGION 1..578: note = Description: MG81-680 effector
MAFGSKNSTPSFVLTLPLDISLNEQNYLYKEFKKCGVIYNQLVSATTKMWHQLRKTRKYRELMAAIAKAVPDSDEQKTLFKQREKMLKEYRFSENAFHKLVVPYAKHFAIHSHVAQKVASAVWTAWEGFFFSKGKAVHYKKLEDVTSISGKNNATGIVLRPANLTTSNIESAKRKAQKAVEKRYDDMYGRPDPKDDKKVVLPDEVKPQMEAEIAAAIAKIKPTIGEGNLRIVYGKHEFPVVLRNPKTQTGKYQQEALKCGVKYCRITRKWVKTKWKYYAQFILEGYPPTKCDSNGVMKHPVNQGRIGLDIGTQTLAISGKDICDLRVLAPSARAQARGLTNEIARTTRAMNRSRRATNPQYFNSDGTIKRLKRKHGHKQRRDWKYSKRYFRLKAKLRDLNRRLGDIRKMEHNILANELLEHGNEFVVEDMNYKALQKRSKETKVNPKTGRAHTKKRFGKSLSRCTPAMFISILNKKANRYGGSVIKVDTFETKASQFDHTDESYTKKRLSERMAHLSSGEVVQRDLYSAFLLEYIDTESLEYNTKALNSAFPAFLKMHENTKERLQEAGSYLPASVGF

SEQ ID NO: 2398 - protein, 536 aa, unidentified
  REGION 1..536: note = Description of Unknown: uncultivated organism sequence
  REGION 1..536: note = Category: MG81 effectors
  REGION 1..536: note = Description: MG81-681 effector
MDADEYKKLLKKFHKLSDRHILVAEADMSYPDVQKVVNLSDRIRKAGNELVSLMKKNYEQLMRTKKYRKLLQLYGSTEDKKKRKTYAGQLNEMQEQYNLTKESCRTLMIPIGKKYGIDAIFALTKAEDVWHGVEKCLYGNGKTLHFSKYGDLPCIRAKQINRGIPMSVKNDELKFKLGKLVFGIQVKDRFQTDEVNAVLDYLASPETTDRKAVQTLLEEACCISTYRPCYATLVPKFIRGKYRVYLHLTIEGRAKPKYDRFGNPRHKYGNGIVGADIGTQTVAYTSDTETGLKNLSERGNSIQTSERLERLYYRAMNRSRRATNPENYNADGTIKKGKKKWTYSRHYKKLKAKHAELCRINATNRQLAINEDVNHLRCLGDTFVTEPKNAARLMKRAKETTVNNKGKINRKKRFGKSVKNRCPGGFQAAVENKFKTSGGTYIEVPNNYRASQYDHTADDYIKKKLSDRMYKLADGTLVQRDWYSSFLLYCYNYRTNGIDKKKCAAEFKKCYSMEKDFIEWIKTNKIKVLNSGIKIA

SEQ ID NO: 2399 - protein, 349 aa, unidentified
  REGION 1..349: note = Description of Unknown: uncultivated organism sequence
  REGION 1..349: note = Category: MG81 effectors
  REGION 1..349: note = Description: MG81-682 effector
MLLTYRYRLKDGSRARKRELRRMARAVNRVWNYCNEAQLHALKHNKRWPRAFDLNNLVAGSSKLLGLQSHTIQAVCEKYAASREAKRKAKLRWRGKRSLGWVPFKASGIKQDGAGWVYLKRRFPCWLHRALPDGGAIKYGSFSEDACGNWFINIVVELPDVEQSDDGADIGIDLGLKDLAALSTGEKIENPRHLSKLAAKLARAQRANKKKLAARTHRKIARARADHLHKASRRITDAARVIVVGDVSSTKLVKTDFARSVLDAGWSSFKEMLRYKATARGASFVCAAEHGTSRTCSCCGDTASGPKGIAGIAVREWTCSNCGASHDRDVNAARNILRVGLNTLKGAPL

SEQ ID NO: 2400 - protein, 562 aa, unidentified
  REGION 1..562: note = Description of Unknown: uncultivated organism sequence
  REGION 1..562: note = Category: MG81 effectors
  REGION 1..562: note = Description: MG81-683 effector
MSRWNKDIEVGERCVLTLPLNCHPRDTRFLDQVFQIENKLKNQLIEWYKTQLNEMTRTRLWREASQALADLHTEYGPDMKLLAELDEKAKKKPLSKTKEAKRVQLRQKAKEFQAKQKPLYETRNGMIRKYEFSRGDFEKRMAKYRRSYTDFVGSMVAQRLADDVWDMFQSYLYGKGKAIRFSGINKFLTIEGKNNSANIVFDRKAMKVFIGQGRHKTGIRVKRSRKDPCGYEAEALSREICYCRITRKAYPEGWRYFLQLVLKGAPPVKAKPDTGELLHPMGEGRVGMDIGPQTLAYCGEDVLDLVELAPGAQNLQEEIRRINRAMDRSRRATNPGMFDKAGQIIPGNRLPRELLDSHGKRKWVKSKQYREMERHRRYLYRKQADLRKAKHQQLANKLLAAGDRFYVEDMSWRALSRRSKQARKNKKGKNLSKKRFGKSIANKSPGAFLSILEKKVLAQGGSFYRINIWKARASQFHHMTGQYIKKKLSQRVDILEDGSKVQRDLYSAFLIMHSNKALDGFLVSSCNRDYPKFLQMHNKAMAALAASDKPLPSSMGVRRKAA

SEQ ID NO: 2401 - protein, 512 aa, unidentified
  REGION 1..512: note = Description of Unknown: uncultivated organism sequence
  REGION 1..512: note = Category: MG81 effectors
  REGION 1..512: note = Description: MG81-684 effector
MPTKQKEDSNRCVLTLPLLTEPWQEHIIEKRFKIIEHLKNQLISIELRKLKNLQRTKAYKNLIKQIESVPKSERTALYKERNKMLKDAGFSQYTFMDDMAGKKSLTQKHFESHINVQIAHKAAIDVWSSFEKFLFGSGQMIHYQKRGTLSSIASKSPKTGMFYYSDENIFKWSGGGTKPKGGIILCLRVASVKTNYEKEMVANNEIKYYRVVRKWMKTKYKYYLQITFAGKPADKHREISTGRVGIDIGTQTIAIASDKSVKLLELADKVNKNHIKKCELQRKLDRSRRYTNPDNFNPDGTVKRGKKGHKLKWNKSKHYIEIAGKIRELERKNADIRKYQHTCLANDILAMGNQIYIEPMNYKGLQKRAKETQVDEKGRYKKKKRFGKSLANKAPAMFVTILKTKAEQHGGEVYEVDIMSYRASQCDHTTGEYTKHGLNDRWRILGNGDKVQRDLYSAFLIKNSNKTHDEIDLDKCSKTYDSFKKLHDKEIENIRNEAKLRERKNISSYGIA

SEQ ID NO: 2402 - protein, 537 aa, unidentified
  REGION 1..537: note = Description of Unknown: uncultivated organism sequence
  REGION 1..537: note = Category: MG81 effectors
  REGION 1..537: note = Description: MG81-685 effector
MISNEEYKKLLKQFHKLSDRHILVVETDMSSSGIQKVIKLSDKIRKAGNELVSLMKKNYDQLMRTKKYRKLLKLYGSTEDKKKRKDLAEQLNKMQKQYNVTWDYCRTAMIPIGKKYGIDAVFALTKAEDIWRGIEKCLYDNGNTIHFSKYGDLPCIRAKQINRGIPMSVKDNKLQFKLGKSAFGIKINDVFQTDEVNAILNYLAEPEIVDNKAIQTLLDEAYCIDTYRPCYATLVPKLIRGKYRVYLHLTIEGKAKPKYDRFGNPRHRFGRGIIGADIGTQTVAYTSDTEIGLKNLAERGNSIQKSERLERLYYRAMDRSRRATNPQNYNKDGTVKKGRKSWKYSNHYKKLKAKHSELCRINAINRQLAINEDANHLRSLGDVFITESKNASKLMKRAKETTVNSKGKFNKKKRFGKSIKNRCPSGFQTTVEKKFKVSGGTYIEVPNNYRASQYDHTIDDYIKKKLSDRMYNLADGTLVQRDWYSSFLLYCYNYKTETIDKDKCFLKFEDCYNKEKALIEWIKANKIKILNSGIKVA

SEQ ID NO: 2403 - protein, 512 aa, unidentified
  REGION 1..512: note = Description of Unknown: uncultivated organism sequence
  REGION 1..512: note = Category: MG81 effectors
  REGION 1..512: note = Description: MG81-686 effector
MPTKQKEDSNRCVLTLPLLTEPWQEHIIEKRFKIIEHLKNQLISIELRKLKNLQRTKAYKNLIKQIESVPKSERTVLYKERNKMLKDAGFSQYTFMDDMAGKKSLMQKHFESHINVQIAHKAAIDVWSSFEKFLFGTGQIVHYQKRGTLSSIASKSPKTGMFYYSDENIFKWSGGGTKPKGGIILCLRVASVKTNYEKEMVANNEIKYYRVVRKWMKTKYKYYLQITFAGKPADKHREISTGRVGIDIGTQTIAIASDKSVKLLELADKVNKNHIKKCELQRKLDRSRRYTNPDNFNPDGTVKRGTKGYKLKWNKSKHYIEIAGKIRELERKNADIRKYQHTCLANDILAMGNQIYIEPMNYKGLQKRAKETQVDEKGRYKKKKRFGKSLANKAPAMFVTILKTKAEQHGGEVYEVDIMSYRASQCDHTTGEYTKHGLNDRWRILGNGDKVQRDLYSAFLIKNSNKTHDEIDLDKCSKTYDNFKKLHDKEIENIRNEVILRKRRNISSYGIA

SEQ ID NO: 2404 - protein, 347 aa, unidentified
  REGION 1..347: note = Description of Unknown: uncultivated organism sequence
  REGION 1..347: note = Category: MG81 effectors
  REGION 1..347: note = Description: MG81-687 effector
MIQYQLKLRMCKSQEQKCEQFLYHLSSVWNWAVRKIELNAKDHIYFSKMEFQNFLSNHSEKMGIPSHTLQGVICTAHDAWKRCFKKIGGKPKLKGMRNKMSSIPFPDPIKAPKGNRINLPALGSVRFHKMELPDGKIKCGRIVKRTSGWYLCLFIDAQPKVIERTGYGVIGVDGGFKDLLTLSTGEKISHPRELEVAAERLAQAQRGHDTKLAARIQEKIANRRKDRNHKLSRRLIAENVVIKFSADNHKAVARRFGKSVASSGHSQLQRMLAYKSPQSGTQYFEIAPKDSTKTCWVCGEPTGPTGLAGLSVRQWRCTTCGTFHDRDQNAAVNTLIAAAGCAVEVCI

SEQ ID NO: 2405 - protein, 369 aa, unidentified
  REGION 1..369: note = Description of Unknown: uncultivated organism sequence
  REGION 1..369: note = Category: MG81 effectors
  REGION 1..369: note = Description: MG81-688 effector
MTEDIVDQEGESGVRQCGARSALTVMRFRLRDKHARELSSQGRAVNFVWNYCNETQQKTARAGRKWLTAVDLQRLTAGASKDLDLHAHTIQKVCQQYDRSRKQHRKPWLRFRGRKSLGWVPFNQGHVTVVAPGKLKFRGVIYETMHWRDLPDGAVIRAGSFNQDSRGRWYINLPIEMPAEAFAKSGGSIVGIDLGLKDLATLSTGEKIENPRHLAKHAERHAKAQRAGKTKLARSIAAKVANCRKDYLHKASARIALAHGTIFVGNVSSERLARTRMAKSVLDAGWSTLRTQLSYKALRHGGKMIEVDERNTSRSCSVCGADSGPKGIAEIGIRRWECEVCGESHDRDVNAALNIVRVGLDTLVEGASL

SEQ ID NO: 2406 - protein, 362 aa, unidentified
  REGION 1..362: note = Description of Unknown: uncultivated organism sequence
  REGION 1..362: note = Category: MG81 effectors
  REGION 1..362: note = Description: MG81-689 effector
MINYQLKLKLTKYQEQQLESWLPILTSIWNWTIRKIELDAKDNIYYNSKFDFVNLLVNHSEKLGVSSHTMMCTTMTAYNLYQQYIKKKCGKPKFKGQRNKLNSILFPDIIKQPQNNKIQLRVIGKIKYHKQQIPEGNIKCVRIIKKVSGWYAVLTIDTKPKKISIISNNKVGIDPGFKHLLTLSNGDKIEHPREFEINAERLAQAQRGHNKKLAAIINEKIANQRKNRNHKLSRKLVSENELIVFSKDNHKNVAKKFGKSVSSSGHYQLQKMLEYKCRTDGRQYIEVDCKFSTMTCSTCNARTGPTGWEGLKVRNWECTECGTLHDRDINAAINTLNSGLGISHENTVKTEIQKTSNEWGNI

SEQ ID NO: 2407 - protein, 537 aa, unidentified
  REGION 1..537: note = Description of Unknown: uncultivated organism sequence
  REGION 1..537: note = Category: MG81 effectors
  REGION 1..537: note = Description: MG81-690 effector
MISDEEYKKLLKQFHKLSDRHILVVETDMPYSDVLKVMILSDKIRKAGNELVSFMRKNYDQLIRTKKYRKLLKLYGSTKDKKKRKDLADQLNEMQKAYNVTWDHCRRSMIPIGRKYGIDAVFALTKAEDVWRGIEKCLYGNGKAIHFSKYGELPCIRAKQINRGIPISVKDDRLQFKLGKTAFGIQVNDRFQQDEADAVLTYLAEPEIVDNKAVNTLIEDAYYIDTYRPCYATLVIKMIRGKYRVYVHLTIEGKTKLKYDKHGNPRHKYGKGVIGADIGTQTVAYTSDTEVGLKNLSERGNSIQTSERKERLLYRAMDRSRRAANPQNYNEDGTVKKGRKTWKYSNHYKKLKAKHSELCRINAVNRQLAINEDANHLRSLGDTFVTEPKNASKLMKRAKETAVNDKGRFNKKKRFGKSIKNRCPSGFQTTVEKKFKTTGGTYIEVPNNYRASQYDHTVDDYIKKKLSDRLYKLQDGTEVQRDWYSSFLLYCYDYKIQKIDKNKCITQFDNCYKKEKALITWIKAHKIKVLNSGIKIA

SEQ ID NO: 2408 - protein, 578 aa, unidentified
  REGION 1..578: note = Description of Unknown: uncultivated organism sequence
  REGION 1..578: note = Category: MG81 effectors
  REGION 1..578: note = Description: MG81-691 effector
MAFGSKNSTPSFVLTLPMVIGFNEQDYLNKEFKKCGVIYNQLVNATTKMWHQLRKTRKYRELMAAIAKAAPDSDEQKALFKQREKMLKEYRFSEDAFHAMVVPYAKHYAINSHVAQSIATAVWTAWSSFFFDKGKEVHYKKLEYVSSISGKNNATGIMLRPANHTTNVINSAKTKAKNSIEKKYFAAYRKPDAKEGEEVVLPDEVKAQMEKEIAAATAKVKTSIGKGKLHITYGDYTFPVTLRNPDTQTGWYQQEALKCGVKYCRIIRKWVSTKWKYYAQIVLEGYPPIKCDNNGVAKHPVKQGRVGIDIGTQTIAFSGKDVCDLRVLAPAARAQAKSLVNEIASTLRAMDRSRRATNPKYYNPDGTIKRLKRQHGQKQKRKWKYSKRYYRLRAKLRNLYRKLADIRKMEHNILANELLTHGNEFVIEDMNYKALQKRSKETKINSKTGRAHTKKRFGKSLSRCAPAMFISILGKKANRYGGSVIKVSTFETKASQFDHTDESYTKKKLSERMARLRNGDIVQRDLYSAFLLEHIDTESLQYNMETLNSAFPAFLEMHENTKRRLQAVGSSLPASIGF

SEQ ID NO: 2409 - protein, 353 aa, unidentified
  REGION 1..353: note = Description of Unknown: uncultivated organism sequence
  REGION 1..353: note = Category: MG81 effectors
  REGION 1..353: note = Description: MG81-692 effector
MKTLKLRIKDKHCKVLDQLASEVNFVWNYVNDLGFRHLKRKGEFLSAFDIAKYTKGTSKECNLHSQTIQAVTEELVTRRKQFKKAKLKWRVSNKKSARRSLGWIPFKKVAMKYANGYVQYGKHQFKLWDSYGLSKYTLKTGSFVEDSRGRWYVCLVVESPKQDKSTATKAIGIDLGLKDIATCSDGTVISNPKFYRKYEQKLGIAQRARNKKRVRALHAKIANSRKDHLHKASTKLVNENALIIVGDLSAKKLVKTKMAKSVLDTGFSALKTMLKYKCENAGVLFEEVQEAYTTQICSCCGEITSSSPKGRTDLGIREWECMSCGTAHDRDINSALNILALGHKRLAVGITLF

SEQ ID NO: 2410 - protein, 913 aa, unidentified
  REGION 1..913: note = Description of Unknown: uncultivated organism sequence
  REGION 1..913: note = Category: MG81 effectors
  REGION 1..913: note = Description: MG81-693 effector
MSYLAAKYIDLGKGVYHFTMKDKLDMLNKNEAVTDLRFGIVSEKYEKGITSFDYERIKAEEELDRNIAAYVTFAADIFAKSVIKSDYRTKKDNNSDVLQYSDKEFRNSEVIRDNAEKNILQYWGGYSRWGTENSKLPENNKVSDFGKLDVSDLCIDIKKHLAGIRNSSVHYTTKIKNESAADGSNVKILFEKDLADINIIYADKYYSNNVWMFYSLEDINKLIAFLYKEKRVIRQVQIPSFSRILKRKAMQDVINEIFKDDFDENIVNPELKEKYRNSLYFMLKEIYYNAFIIQPELKEKFKDKIKTMKSELYNKLKTIDKKEYKALYCMLSNEESALKNFADRIYSVDGDNVSFADICKILMTDYNMQNQEKKNIESMEQKKKNKGKDENYKHFPLLLHKVLKELFIEYLKQTHELEFLRNNICIKSDVTMESFESQIKGVEIYKDLKEKIDKNNSLLDWYVIAHFLMPKQLNHLIGNIKNYIQFATNIDKRAESVKNLTESGMVKRIQYYDDIVRTLEFSAQYIGKISNNINDYFNSEDEYVSFLSKYVGFINDKSEDVLTELKDFCREKINNGSQIIGIYYGGDNVIINRNVIYAQMYSNAEVFSNIYKKVTKNDIINYYEKQNDLKDVFKSGVCQNEDEQRSLCEFQQLKNRIELTELSTYADMVNDFMAQFVEWAYLRERDLMYCQLGIHYIRLFYSDNVLDEKYHKLSDNVIDIEEGALLYQIVAMYDYELRIFETDNSGNAKRIGQGGPGKSIPVFLKKYCNVTDVYECGLELFEDINQHEHIIRFRNDIAHMRYMSNQAMNIMSIVSNIYKSFFVYDTKLKKSISLVFKNILMRYGVIADLVFSYNNKNQSIKDDMDINIINIKNLKSDKYVYKIVNEDIVKQVEIEIRNQVFLEQLHNLLYFSR

SEQ ID NO: 2411 - protein, 392 aa, unidentified
  REGION 1..392: note = Description of Unknown: uncultivated organism sequence
  REGION 1..392: note = Category: MG81 effectors
  REGION 1..392: note = Description: MG81-694 effector
MSSEPPPEVDGANCIRTLRLKLKPEAYAWLNAAAVEINRVWNFANETSAKAARPFAGPPKWLSAYDLDKLTAGATEYFERIGSASIQRVNAEFATRRKQVKKTKLRWRSSRGSRRALGWLPFKAVQLKRKGKSLRFSGKAFRVFEQQRLLGVSWKSGCFTQDAVGDWWLNLAVEVRLEPPVAQNEEVGLDLGLKDTVATSDGEKLEAGHFYRNIEQQIAQAQRRGHKRQAKRLHRRAARRRKDALHKFSRMIVNRYQRIIVGDVSSARLVKTRMAKSVLDAGWGMLKAQLQYKSQQASRSVFIVSERNTTRACSNCRALTGPTGLDMLAVRTWVCSGCGGTHDRDVNAAKNIRFAVRCSPSLSGNESSPSHAPPSQAPCLREARNSALTAVA

SEQ ID NO: 2412 - protein, 556 aa, unidentified
  REGION 1..556: note = Description of Unknown: uncultivated organism sequence
  REGION 1..556: note = Category: MG81 effectors
  REGION 1..556: note = Description: MG81-695 effector
MAFGSKNSTPSFVLTLPMVIGLNEQDYLNKEFKKCGIIYNQLVNATTKMWHQLRKALFKQREKMLKEYRFSEDAFHAMVVPYAKHYAINSHVAQSIATAVWTAWSSFFFDKGKGVHYKKLEYVSSISGKNNATGIMLRPANHTTSVINSAKTKAKNSIEKKYFAAYRKPDAKEGEEVVLPDEVKAQMEKEIAAATAKVKTSIGKGKLHITYGDYTFPVTLRNPDTQTGWYQQEALKCGVKYCRIIRKWVSTKWKYYAQIVLEGYPPIKCDNNGVAKHPVKQGRVGIDIGTQTIAFSGKDVCELRVLAPSARAQAKNLVNEIASTHRAMDRSRRATNPKYYNPDGTIKRLKRQHGQKQKRKWKYSKRYYRLRAKLRNLYRKLADIRKMEHNILANELLVHGNEFIVEDMNYKALQKRSKETKINPKTGRAHTKKRFGKSLSRCAPAMFISILGKKANRYGGSVIKVSTFETKASQFDHTDESYTKKKLSERMARLRSGDIVQRDLYSAFLLEHIDTESLQYNMETLNSAFPAFLEMHENTKRRLQAVGSSLPASIGF

SEQ ID NO: 2413 - protein, 512 aa, unidentified
  REGION 1..512: note = Description of Unknown: uncultivated organism sequence
  REGION 1..512: note = Category: MG81 effectors
  REGION 1..512: note = Description: MG81-696 effector
MPTKQKEGGNRCVLTLPLLTEPWQEHIIEKRFKIIEHLKNQLISIELRKLKNLQRTKAYKNLIKQIESVPKSERTALYKEKNKMLKDAGFSQYTFMDDMAGKKSLMQKHFESHINVQIAHKAAIDVWSSFEKFLFGTGQIVHYQKRGTLSSVASKSPKTGMFYYSDENIFKWSGGGTKPKGGIILCLRVASVKTNYEKEMVANNEIKYYRVVRKWMKTKYKYYLQITFAGKPADKHREISTGRVGIDIGTQTIAIASDKSVKLLELADKVNKNHIKKCELQRKLDRSRRYTNPDNFNPDGTVKRGTKGHKLKWNKSKHYLEIAGKIRELERKNADIRKYQHTCLANDILAMGNQIYIEPMNYKGLQKRAKETQVDEKGRYKKKKRFGKSLANKAPAMFVTILKTKAEQHGGEVYEVDIMSYRASQCDHTTGEYTKHGLNDRWRILGNGDKVQRDLYSAFLIKNSNKTHDEIDLDKCSKTYDSFKKLHDKEIENIRNEVILRKRRNISSYGIA

SEQ ID NO: 2414 - protein, 512 aa, unidentified
  REGION 1..512: note = Description of Unknown: uncultivated organism sequence
  REGION 1..512: note = Category: MG81 effectors
  REGION 1..512: note = Description: MG81-697 effector
MKKSSTDTCCLTLPLKLEKWQEDRLAKRFEIARQLYNTLVHAELKRLVQIKRTAEYLENEQKIRALDRNNPADRAKLQELYKEQRKSLKTAGFTDYSFTTDMGKYYKHFRDNIGSSVAVHGIAPQVWAAFDKVLFKKGGKKVHYKKPGEVNSVQGYSRTGKSGGTEIMFRGPYIEWKGLKLPLKVSPDNAYETDMLQRRVKLVRLVRRPGKRRDRWYAQLVLEGKPAIKADPVTGKAVRPIGSGPVGLDIGPQTLAYSAAGVAGLVELADRVQNIEQEKRCLQRKMDRSRRAANPDNYAEDGTIRRGVKLTHNKSKRYRRSQQELKYLQHRQAEMRKLQHIQLANHLLSLGDHFYVEKMEWSSLTHRAKKTVISEKTGKPRSKKRFGKSIANKAPAMLIEILRQKCKSLGLPNVVEINPADIKASQYNHLTGEYVKKSLSRRWNEMQDGEHLQRDLYSAFLLQHYDSMSKALDLDSLARDYPAFVQYHHREIERLHALPKTPSSMGIRRSIA

SEQ ID NO: 2415 - protein, 512 aa, unidentified
  REGION 1..512: note = Description of Unknown: uncultivated organism sequence
  REGION 1..512: note = Category: MG81 effectors
  REGION 1..512: note = Description: MG81-698 effector
MKKCTTDTCCLTLPLKLEKWQEDRLAKRFEIARQIYNTLVRAEFKKLNELERTPEYKKILEQIHSLDWKDSGNRQRLNDLYRERNQILKNAKFTEYGFKSDMKFYYKHFSDNIGSCVAVHGIAPQVWAAFERYLFKPEGKKVHFKRFGDVHSLRGYSKAGESGGAEITFCGTHIRWKNLELPIKLSPDNAYETEMLSRRVKYVRILRKPGKSKDRWYVQLSLEGKPAIKYDRNAGEIKHPVAHGAVGLDIGPQTLAYSAETTADLVELADQVQNIEQEKRRLQRKMDRSRRSTNPGNYNTDGTIRRGVKLTRNKSKAYCKLQRQLAYLQHTQAETRKRQHTELANYLLSLGDCFYVEEMKWSSLAHRAKETAVSEKTGRFKQKKRFGKSIANKAPSTLIGILQQKCESLGLPGIIYVPLSAKASQYNHLTGEYTPKPLSQRWNTMPDAQRVQRDLYSAFLLQHFDSQAGIYNLQSLQRDYPQFLQYHDQSIRRLSEMPKTLSSMGIRKSIRA

SEQ ID NO: 2416 - protein, 357 aa, unidentified
  REGION 1..357: note = Description of Unknown: uncultivated organism sequence
  REGION 1..357: note = Category: MG81 effectors
  REGION 1..357: note = Description: MG81-699 effector
MIKTLRVRVKDKHAALLRCMAYEVNQIFNKANAITAERACVCSDFGPCKPSYPTAFDLDKSVKKEPDYHIGSATVQEILAYHAKARKQFKRSKLRWRCSSGPRRSLGWIPFRVGQSKYKAGQIVFARHHFKIWDSYGLSGVEFKSGSFSEDARGRWYFNAAVEVAVEPFNGGGDIGIDLGLKDVATCSDGTKLPAERFYRGMENKLKIAQRTNKKARVRAIHAKIKNRRKDMLHKFTTELVKKNAAIFVGDVSSTKLAKTKMAKSIYDASWGLLKTMLSYKAIGYSAWFEDINESYSTQLCSACGEIPASSPKGRAGLGIREWTCSCCGAVHDRDVNAALNILAAGRCRLAGGIPAL

SEQ ID NO: 2417 - protein, 358 aa, unidentified
  REGION 1..358: note = Description of Unknown: uncultivated organism sequence
  REGION 1..358: note = Category: MG81 effectors
  REGION 1..358: note = Description: MG81-700 effector
MQTVTYKYRVKDRSARKTLARHAKACNQVWNYCNAFQRDIEARYRAGAPKRRWPSAFDLAKLCKGVGKELGIHQQTVGTVCDQFAKSRDKAKHSLRFRPSFGVKRALGWIPFQKQSRQIEGNSIWYLGKRYRFFSCKRRPLPDSAKGGAFVEDALGRWYVCFHVEVTERHPHGNGAIGIDLGLKSLAVMSDGQKIEAPRHYRQLEGKLAIAQRAHNKQRVRRIHAKIKNTRKDFLHKLSTTLADQNAIIAVGDVNSKQLAKTRMAKSVFDAGWSTFRTMLKYKSAGYVEVDEKFTTQTCSHCGALPPERPKGIAGLGIRAWECSSCGESHDRDVNAAKNILVLALSAERPVVESRIAA

SEQ ID NO: 2418 - protein, 550 aa, unidentified
  REGION 1..550: note = Description of Unknown: uncultivated organism sequence
  REGION 1..550: note = Category: MG81 effectors
  REGION 1..550: note = Description: MG81-701 effector
MGWKSKGRGGTLVDNEEKKEDGATCCLTLPLKLEKWQSDHLEKRFEIARQLYNTLVHAELKKKCQVERMPEYQEIMKMIDTASNQKEKWALEKKRKAFLEENGFSRNAFKADMEKYYKHFNDNIGANVALHGITAQVWIAFDKVFVDNYKQKGKVHFKKPGELCSMQGYSQKKSGGKEIMFREDRIIWNQQGNRDRKKVKREFLLKLSPDNPYEAEMLKRHVKFVRILRKDGKTKPHWYAQLVLEGKPAVKRDPASGAPKHPIGHGVVGIDIGTRTLAYSTDKEVNLLELADRVQNIEQEKRRLQRKMDRSRRATNPENYNPDGTFKRGVKLTRNKSKRYKRIQHQYAMIQHHQADIRKQQHNELANYLLTLGDCFFVENMSYCDLVHRANKTEISEKTGRYKRKKRFGKSIANKAPAMLITMLKQKCQSRGLEGVKEVDTHVCASQYNHQTDTCIKKALENRWNIMPDGERIQRDLYSAFLLQHCRRDLPEYNRKELQKEFGEELYRVFDREALQRDYPQFVAYHHMTIQRLSELPHTIPSMGIRRSIS

SEQ ID NO: 2419 - protein, 534 aa, unidentified
  REGION 1..534: note = Description of Unknown: uncultivated organism sequence
  REGION 1..534: note = Category: MG81 effectors
  REGION 1..534: note = Description: MG81-702 effector
MGWKSKGRGGKRVKRSSTDTCCLTLPLKLEKWQSDRLEKRFEIGRQIYNTIVHAELKKLRKLERTQQYQEIEQKLENAKQEETKELWKKKRQLLDQNGLSENHFKADMKHYYPHFKDNIASSVAVHGIASQAWTAFEKVLLSKDGKMVHFKKKGELSSLRGYSQTGKSGGIEIIFRGSYVEWKGLKLPLKLSPDNDYETEMLSKRVKYVRILRQDGKTKPHWYAQLVLEGKPAVKRDPISGAPKHPIGRGVVGIDIGTRTLAYSADSKVDLIELADRVQNIEQEKLLLQRKLDRSRRATNPENYKPDGTIKKGVKLTRNKSKRYRRIQHQLAMIQHHQADIRKQQHNELANYLLTLGDCFFVENMSYCDLAHRANKTEISEKTGRYKRKKRFGKSIANKAPAMLITMLKQKCQSRGLEGVKEVDTHVCASQYNHQTDTCIKKALENRWNIMPDGERIQRDLYSAFLLQHCRRDLPEYNRKELQKEFGEELYRVFDREALQRDYPQFVAYHHMTIQRLSELPHTIPSMGIRRIIS

SEQ ID NO: 2420 - protein, 391 aa, unidentified
  REGION 1..391: note = Description of Unknown: uncultivated organism sequence
  REGION 1..391: note = Category: MG81 effectors
  REGION 1..391: note = Description: MG81-703 effector
MQPKDLTHSHVHSVTRTLRLKVKTESYAWLNTAACEVNQVWNWSAEVSEKAARPCTGERKWLTGFDLNNLSAGASEHFDKVGADTIQRVNGEYAEKRRIAKRYRLKWRTSRGPRRSLGWVPFKAANLKRKGRAVRFCGKTLRVFEPERLEGVQWKQGHFAQDAVGDWWLSLPIAVQVDDSVAPLEKVGIDLGLKEIAVTSDDARCEKGRFYRDIERKIAQAQRRGHRRQAKYLHRRAANRRKDALHKFSRQIVDQYQKIVVGDVSSTKLVKTRMAKSVLDAGWGMLRRYLQYKSQQAGRTFQIVNERNSSRTCSNCDALTGPQGVNGLRVRRWRCAACGASHDREVNAARNHLRRAELPASVRERASVFAGPPSRASRSRKAGLEPVRTVA

SEQ ID NO: 2421 - protein, 522 aa, unidentified
  REGION 1..522: note = Description of Unknown: uncultivated organism sequence
  REGION 1..522: note = Category: MG81 effectors
  REGION 1..522: note = Description: MG81-704 effector
MKRSSTDTCCLTLPLKLEKWQSDRLEKRFEIGRQIYNTIVHAELKKLRKLERTQQYQEIEQKLENAKQEETKELWKKKRQLLDQNGLSENHFKADMKYYYPHFKDNIASNVAVHGIASQAWTAFEKVLFSKDGKMVHFKKKGELSSLRGYSRAGKSGGVEIIFRGSYVEWKGLKLPLKLSPDNDYETEMLSKRVKYVRILRKDGKTKTHWYAQLALEGKPAVKRNSISGAPKHPVGHGVVGIDIGTRTLAYSTDSEVNLLELADRVQNIEQEKRRLQRKMDRSRRAMNPGNYKPDGSIKQGVKLTWNNSKRYKRIQHQYAMIQHHQADIRKQQHNELANYLLTLGDCFFVENMSYCDLAHRANKTEISEKTRRYKRKKRFGKSIANKAPAMLITMLKQKCQSRGLEGVKEVDTHVCASQYNHQTDTCIKKALENRWNVMPDGERIQRDLYSAFLLQHCRRDLPEYNRKELQKEFGEELYRVFDREALQRDYPRFVAYHHMTIQRLSELPHTIPSMGIRRIIS

SEQ ID NO: 2422 - protein, 511 aa, unidentified
  REGION 1..511: note = Description of Unknown: uncultivated organism sequence
  REGION 1..511: note = Category: MG81 effectors
  REGION 1..511: note = Description: MG81-705 effector
MAKCSTDTCCLTLPLRLEKWQEDRLAKRFEIARQINNTMVRAELKKLRAMEQSEPYKANQEKIQALDWKTQTDKQALKALYKERDKLLRDGGFSEYGFKSDIKNYYKHFNNNIGSNVAFHGIAPQVWAAFEKMLFKKEGKKVHFKKKGDIHSLRGYSAAGKSGGVEIIFRETYIEWKGLKLPLKLSPDNIYETQMLSYRVKYVRLLRKPGKRKDRWYAQLSLEGKPVIKYNPKTGEVRHPIGKGAVGLDIGPQTLAYSAATGADLVELANQVQNVEQEKRRLQRKLDRSRRATNPGNYADDGTIRRGIALTHNKSKRYLRTQQELKYLQHQQAEIRKRQHTELANHLLSLGDCFYVEKMVWTSLTHRAKETEISEKTGKIKRKKRFGKSVANKAPATLIGILQRKSAALGIPGVIEVPTSVKASQYNHQSGTYTPKPLSQRWNNMPDGERIQRDLYSAFLLQHYDPQTNTFDANSLHQDYPQFVQYHHDAVLRLYAMPKTPSSMGIKRSLR

SEQ ID NO: 2423 - protein, 343 aa, unidentified
  REGION 1..343: note = Description of Unknown: uncultivated organism sequence
  REGION 1..343: note = Category: MG81 effectors
  REGION 1..343: note = Description: MG81-706 effector
MPPSLMRTLRLKVRSEAYPWLNAAAIEVNAVFNYCNETSLKAATRTDLKRKWLTGFDLCALTAGATEYFDKIGADTIQSVCIHYAQKRKAAKKLKLKWRVSRGAQRSLGWIPFKAASLKRKGRGVRFAGKCIRVFERERLEGVKWQGGEFAQDAVGDWWLCLPVKVQADCSIAPQEEVGIDLGLKTIAVTSDGDRLEAGRWTHRYAEKLASAQRRGHKRQAKRIHRKIARCRADALHYFSRKMVDRYQKIVVGDVSSLKLVKTRMAKSVLDSGWGTLKRFLEYKCEHAARSFEVRDERYSTVTCSNCGALSGPREVNGLIVDHGNVATVESCMTETLIRLGIT

SEQ ID NO: 2424 - protein, 350 aa, unidentified
  REGION 1..350: note = Description of Unknown: uncultivated organism sequence
  REGION 1..350: note = Category: MG81 effectors
  REGION 1..350: note = Description: MG81-707 effector
MQTITIKLRLRDKHSAELRRQARAVNFVWNYCNETQQKAARDRRKLLTGFDLAKLTSGTSKMLDLHAHTISRVAIQYEKSRKQHRKLWLKWRGRKSLGWVPFNTGHVSFDGACLKFRGKVYEPMHLRDVLMPGVKIGAGSFNQDSRGRWYINLPVQAVTADSAPVARIGIDLGLKSLATMSDGSKIEAPRFYKTSETALATAQKRRKSKRTKAIHAKIANRRKDFLHKESARLAKTYGLIVVGDVSPNAIAKSRMAKSSLDAGWAAFKGMLSYKAIRHGGSTLEVSERYTTQTCSCCGSVGSSTRPKGIAGLGIREWSCEDCGTTHDRDVNAARNILRRGLATLAEGTPA

SEQ ID NO: 2425 - protein, 538 aa, unidentified
  REGION 1..538: note = Description of Unknown: uncultivated organism sequence
  REGION 1..538: note = Category: MG81 effectors
  REGION 1..538: note = Description: MG81-708 effector
MNNEEKEKDGATCCLTLPLKLEKWQSDHLEKRFEIARQLYNTLVHAELKKKCQVERMPEYQEIMKMIDAASNQKEKWALEKKRKAFLEENGFNRNAFKADMEKYYKHFNDNIGANVALHGITAQVWIAFDKVFVDNYKQKGKVHFKKPGELCSVQGYSQKKSGGKEIMFREDRIIWNQQGNRDRKKVKREFLLKLSPDNPYEAEMLKRHVKFVRILRKDGKTKPHWYAQLVLEGKPAVKRDPASGAPKHPIGHGVVGIDIGTRTLAYSTDKEVNLLELADHVQNIEQEKRRLQRKMDRSRRATNPENYNPDGTFKRGVKLTRNKSKRYRRIQHQLAMIQHHQADIRKQQHNELANYLLTLGDCFFVENMSYCDLVHRANKTEISEKTGRYKRKKRFGKSIANKAPAMLITMLKQKCQSRGLKGVKEVDTHVRASQYNHQTDTCIEKALENRWNVMPDGERIQRDLYSAFLLQHCKQGLPEYNRKELKKEFGEELYRVFDREALQRDYPQFVAYHHMTIQRLSELPHTIPSMGIRRIIS

SEQ ID NO: 2426 - protein, 356 aa, unidentified
  REGION 1..356: note = Description of Unknown: uncultivated organism sequence
  REGION 1..356: note = Category: MG81 effectors
  REGION 1..356: note = Description: MG81-709 effector
MKTLHIRIKDKHAKALDALARDVNMVWNYCNDLSYKHLQRTGKFFSSYDLQKYTAGATKEGLSINSASVQMIGAELVTRRKQFKKAKLRWRTSFGSRKSLGWIPFRHDCIAYKNGQLRYAGQCFGLWDSYGLSQYKLGSGSFSQDARGRWYANICVEVPVFVGPIKPPELCECVGIDLGLKDFATMSDGVKVEAQRLYRCAEAKLAVAQRANKKARVKAIHAQIANRRKDALDKLSTKLVCENRAIFVGNVNASGLAKTNMAKSVLDAGWTSFRTMLSYKSIATGVLFDEVNEAYSTQTCSCCGTLPDSRPRGIAGLGIREWTCSECGAHHDRDVNAAKNILQRGHALLAVGIPVL

SEQ ID NO: 2427 - protein, 538 aa, unidentified
  REGION 1..538: note = Description of Unknown: uncultivated organism sequence
  REGION 1..538: note = Category: MG81 effectors
  REGION 1..538: note = Description: MG81-710 effector
MDNEEKKEDGATCCLTLPLKLEKWQSDHLEKRFEIARQLYNTLVHAELKKKCQVERMPEYQEIMKMIDAASNQKEKWALEKKRKAFLEENGFSRNAFKADMEKYYKHFNDNIGANVALHGITAQVWIAFDKVFVDNYKQKGKVHFKKPGELCSVQGYSQKKSGGKEIMFREDRIIWNQQGNRDRKKVKREFLLKLSPDNPYEAEMLKRHVKFVRILRKDGKTKPHWYAQLVLEGKPAVKRDPASGAPKHPIGHGVVGIDIGTRTLAYSTDKEVNLLELADRVQNIEQEKRRLQRKMDRSRRATNPENYNPDGTFKRGVKLTRNKSKRYRRIQHQLAMIQHHQADIRKQQHNELANYLLTLGDCFFVENMSYCDLVHRANKTEISEKTGRYKRKKRFGKSIANKAPAMLITMLKQKCQSRGLKGVKEVDTHVRASQYNHQTDTCIEKALENRWNVMPDGERIQRDLYSAFLLQHCKQGLPEYNRKELKKEFGEELYRVFDREALQRDYPQFVAYHHMTIQRLSELPHTIPSMGIRRIIS

SEQ ID NO: 2428 - protein, 352 aa, unidentified
  REGION 1..352: note = Description of Unknown: uncultivated organism sequence
  REGION 1..352: note = Category: MG81 effectors
  REGION 1..352: note = Description: MG81-711 effector
MKTLKLRIKDKHSAVLNQMACEVNFVWNYVNDLGFKHLKRKGEFLSAYDIAKYTKGTSKECNLHSQTIQAVTEELVTRRKQFKKAKLKWRVTNKKSARRSLGWIPFKKIAIKYANGYVQYGKHQFRVWDSYGLSQYSVKTGSFVEDARGRWYVCLVVESSKTVKITSTKAIGIDLGLKDIATCSDDTVISNPKFYRKYEQKLGIAQRARNKKRVRALHAKIGNCRKDYLHKSSTMLVKKNALIVVGDLSAKKLVKTKMAKSVLDTGFSALKTMLKYKCENAGVLFEEVNERFTTQICSCCGEITTGSPKGRADLRIRVWECECGSINQRDLNSAKNILALGHKRLAVGISLF

SEQ ID NO: 2429 - protein, 350 aa, unidentified
  REGION 1..350: note = Description of Unknown: uncultivated organism sequence
  REGION 1..350: note = Category: MG81 effectors
  REGION 1..350: note = Description: MG81-712 effector
MIVVYRYRVKSLNGLLNKQSRAVNYVWNFCNDTQKHALKWGKKWPTGFDLNVLTTGSSKELGIHSGTVNATCEQYAKSRSQHRRPFLRYRGRRSLGWVPLKGRDLKREGQAFRFAGNTFRVFNSRPLPEGKIKDGTNFAQDARGNWFLNIVIEVADVPARPIRTGVGVDLGLKDFATLSTGEKLPNDRFGRCAAEKLAKAQRARKHKRHIAKLHAKVANARADFQHKLALDLVRRFDYIAVGNVSAAKLAKTRMAKSVYDASWSSFRDRLRYKAIAHGATFEEVNESGTTQSCSACGSKDCTTRPRGISGLRIREWTCSRCGVVLDRDTNAALNILRCGRASPAVGISCL

SEQ ID NO: 2430 - protein, 367 aa, unidentified
  REGION 1..367: note = Description of Unknown: uncultivated organism sequence
  REGION 1..367: note = Category: MG81 effectors
  REGION 1..367: note = Description: MG81-713 effector
MYQVLKLRIYRKHYVKLDKLSSAVNFVWNYVNDLCWQMWRRKRIFPSAYDIHEYTKGAGEELGLHSQTIQFIGEKHHQSRKQHKKVKLAWRTNRKDAKRKSLGWIPFKASAISHVKTYNTGKKALKSQVQLSCGKEKLILTVYDQYDLRRYNGFRTAEIVQDSCDDWYLCLLVKVEPKVCTATSEVGIDYGCKTAAICSNGDKLETKFTQQYAEKLATAQRAHKKKQARRINRKIKNKRADATHQFTGKLVKENRLIVAGNVKSSSFTSGKLAKSVYDANWFAINRQLEYKSRRAGCQFIKVDEKFSTQTCANCLQITNSSPKGVAGLGIREWICDCCGQLNDRDVNAAKNILRFGRETLAGGSPIL

SEQ ID NO: 2431 - protein, 349 aa, unidentified
  REGION 1..349: note = Description of Unknown: uncultivated organism sequence
  REGION 1..349: note = Category: MG81 effectors
  REGION 1..349: note = Description: MG81-714 effector
MLQVQLKLRPCKAQEQIYDQWLYNLASVYNFAVRKIELNAKDKIYFSKNDFQNLLANHGEKLGIPSHTIQGVLCTVHDAWKRCFKKTAGKPKLKGMRNKMSSIPFPDPIKAPKGNRITLPGLGSVRFHKQEISEGKIKCGRLIKRASGWYLCLFIDAEPNPIKRLAFGAIGIDPGFSNLLTTSDGEVIEHPRELEAAAERLGQAQRGHNKQLAARIQERIANRKKDRNHKLTTKLVSENVLIVWSKDAIKGIAKRFGKSVSSSSHAQIRQMLSYKMPKSGGTFIEVASKYSTKTCNECGNPTGPTGLAELSVRQWRCSACGAEYDRDVNAARNTLFAGAGCAHEELAYV

SEQ ID NO: 2432 - protein, 350 aa, unidentified
  REGION 1..350: note = Description of Unknown: uncultivated organism sequence
  REGION 1..350: note = Category: MG81 effectors
  REGION 1..350: note = Description: MG81-715 effector
MIVVYRYRVKSLNGLLNKQSRAVNYVWNFCNDTQKHALKWGKKWPTGFDLNVLTTGSSKELGIHSGTVNATCEQYAKSRSQHRRPFLRYRGRRSLGWVPLKGRDLKREGEAFRFAGNTFRVFSSRPLPEGKIKDSTNFARDARGNWFLNIVIEVADVHARPIRTGVGIDLGLKDFAALSTGEKLPNDRFGRRAAEKLAKAQRARKHKRHIAKLHAKAANARADFQHKLALDLVRRFDYIAVGNVSASKLAKTRMAKSVYDASWSSFRDKLRYKAIAHGATFEEVNESGSTQSCSSCGSKDSTTRPKGIAGLRIREWTCSVCGVVHDRDTNAALNILRCGRASPAVGISFL

SEQ ID NO: 2433 - protein, 358 aa, unidentified
  REGION 1..358: note = Description of Unknown: uncultivated organism sequence
  REGION 1..358: note = Category: MG81 effectors
  REGION 1..358: note = Description: MG81-716 effector
MTKTFSFRIKDSTSAKHLRAMARAVNYVWNYCNEIQKKAAHDNRRWVNWVMLNNLTSGCSKELRLHSQTIQAIGERFHASLKEAKFPTGKKKRFLRFRGRRSQGWIPFKASGIKLRDDVVVYQGRTFRFWKSRDIPSTIKCGNFSCDARGRWYVNLVCKYEETIVSKEDTVGIDLGLKSVATLSNGKKYDAQKFFRKYERKLVHHQRCNNGRQVRTIHAKIANSRKDFNHKVSHELTRDFNKIFVGDVGCLSLLKTKLAKSVSDASWGQLRTFIEYKAIARGGTYYVVDENNTTRTCSACGCLSGPSGLAGLRVREWQCKECGTVHDRDTNSAINIEQRGLLTLCSPLRTLSAKEEIL

SEQ ID NO: 2434 - protein, 386 aa, unidentified
  REGION 1..386: note = Description of Unknown: uncultivated organism sequence
  REGION 1..386: note = Category: MG81 effectors
  REGION 1..386: note = Description: MG81-717 effector
MAGDIPPNNDDQLNINTLYVHTTMNIQIKILSVRIKDKHAAVLRQMAFEVNQIFNLANEITSAAYGNAGFFGAQKPQWLSAFDVQKPLLKERKERGYTIPSHTVQEIAAIHGKARKQFKRSRLRWRVSGGSRRSLGWVPFKIGSAVWKNGAVRFAGRIFNVWDSYGLGGFKFRAGSFSEDSRGRWYFNVCVEVETVPSTATSAVGIDLGLKDYATPSEGDPLIAGRFYRDLEPALGKAQRANKKARVRAIHAKIKNRRKDALHKYSTALVNSHAAIFVGDASSKKLVKTKMAKSILDAGWFMLKTQLEYKAIARSVMFEVVNESYSTQACSCCGAISANSPKGRAGLRIREWTCCECGTTHDRDVNAAKNILAAGHRRLAVGIPFL

SEQ ID NO: 2435 - protein, 570 aa, unidentified
  REGION 1..570: note = Description of Unknown: uncultivated organism sequence
  REGION 1..570: note = Category: MG81 effectors
  REGION 1..570: note = Description: MG81-718 effector
MHGTSQSFSGVFCVQIRGVLRPVFGGWKALFRDLECNPLQICEFWPIINIITKKRGIPVKKCTTDTCCLTLPLKLEKWQEDCLAKRFEIARQIYNTLVRAEFKKLNELERTPEYNKILEQIHSLDWKGSGNRQRLNDLYRERNQILKNAKFTEYGFKSDMKFYYKHFSDNIGSCVAVHGIAPQVWAAFEKYLFKPEGKKVHFKRFGDVHSLRGYSKAGESGGAEITFCGTHIRWKNLELPIKLSPDNAYETEMLSRRVKYVRILRKPGKSKDRWYVQLSLEGKPAIKYDRNAGEIKHPVAHGAVGLDIGPQTLAYSAETTADLVELADQVQNIEQEKRRLQRKMDRSRRSTNPGNYNTDGTIRRGVKLTRNKSKAYCKLQRQLAYLQHTQAETRKRQHTELANYLLSLGDCFYVEEMKWSSLAHRAKETAVSEKTGRFKQKKRFGKSIANKAPSTLIGILQQKCESLGLPGIIYVPLSAKASQYNHLTGEYTPKPLSQRWNTMPDAQRVQRDLYSAFLLQHFDSQAGIYNLQSLQRDYPQFLQYHDQSIRRLSEMPKTLSSMGIRKSIRA

SEQ ID NO: 2436 - protein, 336 aa, unidentified
  REGION 1..336: note = Description of Unknown: uncultivated organism sequence
  REGION 1..336: note = Category: MG81 effectors
  REGION 1..336: note = Description: MG81-719 effector
MQTYHFRIKDSTHINWLCKKAGIVNHIWNEVQSFRLSFYNLFGDLFSEYDIHKICKFQNINSATVQLVIKNYIQKSKQFKKLKLKWRTSRKSLGWIPFDKRNFLFDYETGTATYMKRSFKLWYSQKVDGNVLCGSFNQDASGHWFLNITTDAVIEKERVCDREIGIDLGCKEQITCSDGVVYERENLTRKFADKLATAQRARKKRQVTKIHRKIKNIRNDWNNKVTTDICRTSKLVVVGNIIAKGLCKTRMAKSIFDVATFQIKSMLSYKAIRHCMDVLIVSEKFSTVTCSVCHEKTGPSGLSGLGVRAWDCPICGSHHHRDVNAAINILSSVRGI

SEQ ID NO: 2437 - protein, 538 aa, unidentified
  REGION 1..538: note = Description of Unknown: uncultivated organism sequence
  REGION 1..538: note = Category: MG81 effectors
  REGION 1..538: note = Description: MG81-720 effector
MDNEEKEKDGATCCLTLPLKLEKWQSDHLEKRFEIARQLYNTLVHAELKKKCQVERMPEYQEIMKMIDAASNQKEKWALEKKRKAFLEENGFSRNAFKADMEKYYKHFNDNIGANVALHGITAQVWIAFDKVFVDNYKQKGKVHFKKPGELCSVQGYSQKKSGGKEIMFREDRIIWNQQGNRDRKKVKREFLLKLSPDNPYEAEMLKRHVKFVRILRKDGKTKPHWYAQLVLEGKPAVKRDPISSAPKHPVGHGVVGIDIGTRTLAYSTDKEVNLLELADRVQNIEQEKRRLQRKMDRSRRAMNPENYNSDGTFKRGVKLTRNKSKRYRRIQHQLAMIQHHQADIRKQQHNELANYLLTLGDCFFVENMSYCDLVHRANKTEISEKTGRYKRKKRFGKSIANKAPAMLITMLKQKCQSRGLEGVKEVDTHVRASQYNHQTDTCIEKALENRWNVMPDGERIQRDLYSAFLLQHCKQGLPEYNRKELKKEFGEELYRVFDREALQRDYPQFVAYHHMTIQRLSELPHTIPSMGIRRIIS

SEQ ID NO: 2438 - protein, 538 aa, unidentified
  REGION 1..538: note = Description of Unknown: uncultivated organism sequence
  REGION 1..538: note = Category: MG81 effectors
  REGION 1..538: note = Description: MG81-721 effector
MDNEEKEKDGATCCLTLPLKLEKWQSDHLEKRFEIARQLYNTLVHAELKKKCQVERMPEYQEIMKMIDTASNQKEKWALEKKRKAFLEENGFSGNAFKADMEKYYKHFNDNIGANVALHGITAQVWIAFDKVFVDNYKQKGKVHFKKPGELCSVQGYSQKKSGGKEIMFREDRIIWNQQGNRDRKKVKREFLLKLSPDNPYEAEMLKRHVKFVRILRKDGKTKPHWYAQLVLEGKPAVKRDPASGAPKHPIGHGVVGIDIGTRTLAYSTDKEVNLLELADRVQNIEQEKRRLQRKMDRSRRATNPENYNPDGTFKRGVKLTRNKSKRYKRIQHQYAMIQHHQADIRKQQHNELANYLLTLGDCFFVENMSYCDLVHRANKTEISEKTGRYKRKKRFGKSIANKAPAMLITMLKQKCQSRGLEGVKEVDTHVRASQYNHQTDTCIEKALENRWNVMPDGERIQRDLYSAFLLQHCKQGLPEYNRKELKKEFGEELYRVFDREALQRDYPQFVAYHHMTIQRLSELPHTIPSMGIRRIIS

SEQ ID NO: 2439 - protein, 368 aa, unidentified
  REGION 1..368: note = Description of Unknown: uncultivated organism sequence
  REGION 1..368: note = Category: MG81 effectors
  REGION 1..368: note = Description: MG81-722 effector
MKTLKLRIRDKHTAKLNRLSGAVNFVWNYVNALSYEHLKRTGKFFSAYDLNEYTKGSGELVGLHSQTIQAINETHAKARKQFKKAKLSWRTNNPKSKRKSLGWLPFKKSAIKHIATYQTGKKGLKSTLQLSLAKGQKLIIDLWDSYNLSLYQINTLEIVQDSRNRWYACITVKEYPKTTCGTGSVGIDLGLKDSATASNGDKLQIKQTLKYAKQLAIAQRSNNKKRIKAIHAKIKHTRQDLIHKFTTQLVKDNALIVVGDVKTTQFNSKKGKLAKSVYDAGWFELKRQLTYKCENAGCRFEIVSERYTTQTCSCCGQIDRNSPKGRAGLRIREWTCAMCGTWHDRDINASRNILAVGLGRLGAGIPER

SEQ ID NO: 2440 - protein, 512 aa, unidentified
  REGION 1..512: note = Description of Unknown: uncultivated organism sequence
  REGION 1..512: note = Category: MG81 effectors
  REGION 1..512: note = Description: MG81-723 effector
MPTKQKEGGNRCVLTLPLLTEPWQEHIIEKRFKIIEHLKNQLISIELRKLKNLQRTKAYKNLIKQIESVPKSERTALYKERNKMLKDAGFSQYTFMDDMAGKKSLMQKHFESHINVQIAHKAAIDVWSSFEKFLFGTGQIVHYQKRGTLSSVASKSPKTGMFYYSDENIFKWSGGGTKPKGGIILCLRVASVKTNYEKEMVANNEIKYYRVVRKWMKTKYKYYLQITFAGKPADKHREISTGRVGIDIGTQTIAIASDKSVKLLELADKVNKNHIKKCELQRKLDRSRRYTNPDNFNPDGTVKRGTKGHKLKWNKSKHYIEIAGKIRELERKNADIRKYQHTCLANDILAMGNQIYIEPMDYKGLQKRAKETQVDEKGRYKKKKRFGKSLANKAPAMFVTILKTKVEQHGGEVYEVDIMSYRASQCDHTTGEYTKHGLNDRWRILGNGDKVQRDLYSAFLIKNSNKTHDEIDLDKCSKTYDSFKKLHDTEIENIRNEVMLRERKNISSYGIA

SEQ ID NO: 2441 - protein, 360 aa, unidentified
  REGION 1..360: note = Description of Unknown: uncultivated organism sequence
  REGION 1..360: note = Category: MG81 effectors
  REGION 1..360: note = Description: MG81-724 effector
MEVTKMLVRELKLKPTKRQEATLNEWLWCLTGVYNWASRKIELDAQDKIYHRKLAFQNSLSGVSKKLDIPSHTIQATILQAYNAWERCFKKVSKQPKLKSVRNKLRSICFPDPLNGKRISENRISLPGLKSVRFYKQDLPEGSIKQARIVKRALGWYCQICIDTVHIFPVENTDEAVGIDTGFKDLAILSTGKKFSNGREFVKGQKRLAQAQRGGRKKLAARLYERISSRRKDYNHKVSRQIVQNFKEIYITNDNLRGQAKIFGKSVSDAGISQLRQFLIYKGAQHSRKVVLVDSKYTTMTCSICGSLTGPTGLSGLVVRTWKCGACGAQHDRDVNAAKVILKSGLGCSLGVLESSGGAR

SEQ ID NO: 2442 - protein, 338 aa, unidentified
  REGION 1..338: note = Description of Unknown: uncultivated organism sequence
  REGION 1..338: note = Category: MG81 effectors
  REGION 1..338: note = Description: MG81-725 effector
MNDLSFQVWRRKRVFLSAYDIHEYTKGAGEELGLHSQTLQAVGETHAKSRKQANRSKLHWRTNRKDAKRKSLGWIPFKASAVKVLRTYNTGKTALKSQVQLSCGKEKLILTMYDQYDLRRYTEIKTASVVEDICGNWYLCLTVKVNPVTANIATGEVGIDLGCKTAATCSNGDKLETKFTHQYAEKLATAQRAHKKKQARKIHRKIRNSRANATHQFTNLLVKNNRLIVIGNMKASTFTSGKLAKSVYDANWSEIERQLEYKCEHAGCLLVKVNENFSTQTCANCLQITNSSPKGVAGLGIREWICGCCGQLNDRDVNAAKNILRFGRETLAEGSPVI

SEQ ID NO: 2443 - protein, 387 aa, unidentified
  REGION 1..387: note = Description of Unknown: uncultivated organism sequence
  REGION 1..387: note = Category: MG81 effectors
  REGION 1..387: note = Description: MG81-726 effector
MIIPMQTKTLKLRIKDKHAAWLRGLAREVNQVFNFCNEVSAKASSPYNSKPRWLSGYDLQKLVAGSTKGEDALSIPSQTLQQVCEEYASRRKQFKKHKLRWRVSNPKSSKYSLGWLPFKKGTVVYKNGQIRYAGKLLSLWDSYSLGQFELRAGSITEDSRGRWYLNVVVQVESTNGNGTSILGIDLGLKEAASCSDGQVLKSRWFREMEQALATAQRSGKKMRTKAIHAKIANRRKDAMHKLSTKLVKENAAIFVGNVASAKLVKTNMAKSTLDAGWSMFKTMLEYKAQAAGVVFEEVNEAWSTQKCSACGSIEGPKGRKELYVRSWTCSCGAHHDRDVNAATNICAKGLAQLAISKAAEVEAGEPVLNKAQAEVGHGLPAEGILTL

SEQ ID NO: 2444 - protein, 377 aa, unidentified
  REGION 1..377: note = Description of Unknown: uncultivated organism sequence
  REGION 1..377: note = Category: MG81 effectors
  REGION 1..377: note = Description: MG81-727 effector
MNGASSTKTKVLRLRLKDKHAKLLRDLAREVNFVWNYCNELQITMFNRERRFLSGYDFPKFTRGATKEGLRLHSQTVQAIAEEYATPRRQFSKVRLSRRKSTGNRRSLGWIPFKKSAIQPAHGQVKFAGQWLSLWDSYGLEAYQIRAGNICEDARGRWYLNACVAVPSAEPRSSARRDVGIDLGLEDLVATSDGGKLSAPQFYRGLEPKLVIAQRAVKKHRVRAIHAKIANRRNDSLHQFSTRLVRGYDTIFVGNVNASALVKTTPYAKSVLDAGWSAFRTMLRYKCDFAGATFAEIDEAFSTQTCSACDSRSGPKGIAGLGIRAWKCSKCGAVHDRNVNAAKNILAAGRRRLAEGIPAPFRAREDVKNAVVLGKPL

SEQ ID NO: 2445 - protein, 383 aa, unidentified
  REGION 1..383: note = Description of Unknown: uncultivated organism sequence
  REGION 1..383: note = Category: MG81 effectors
  REGION 1..383: note = Description: MG81-728 effector
MIQCQLKLRLTKAQEATLEVWLFRLTGVWNWAVRKIELDARDKIYHSKYDLDAMLVGHCTRLEIPKQVLKCTIFTVHQAWMRCFKKLSKKPRLKGNRNRLNSIPFSAQILRPKAARIHVSGLGKVKFHKQEMPEGKIKCARIVRRASGWYYCLFIDAEPNAIPRKASGQIGIDAGFKNLLTASTGEIIEHPRELEAVAQRLGQAQRARNRKLTARIQERIRNRRKDRNHKISRQLVSENVLIAFSKDSHNRIAKRFGKSVASSGHGQLRSMLTYKSRAGGAVYVEPESRNSTKRCSNCGSLSGPTGLSGLAVRRWTCGCGAEHDRDCNAAINTLIVGLGMSHERAHKTPVRNPVPPSEVQVEELKHRKFIPEQAGFRRRKIWK

SEQ ID NO: 2446 - protein, 364 aa, unidentified
  REGION 1..364: note = Description of Unknown: uncultivated organism sequence
  REGION 1..364: note = Category: MG81 effectors
  REGION 1..364: note = Description: MG81-729 effector
MKTYQFRLKSTNQAKLSKMAGAVNFVWNYVNSVSKEYTEKKGVWLSAFDLQHLTKACSGELGLNAKTVQMICHEHVNRRKGSKRLQLAWRSKNRSLGWIPFSGQDLPLKGDVVKHIGIEFRFWKTREIEGKIKVGSFCQDARGRWYVNFTCESVNKEPVDSNISVGIDLGLKTIATLSDGRTLNRENITNKYADRLAMAQRAGKKRLTKTIHTKIKNVRKDWNHKQTTNIVNSYDTIVVGNVSSSKLKKTRMAKSVSDAGWADFKRMLAYKAIALGVQYKEVNESFSTVTCSICEGKTGPTGLSNLGVREWTCSTCGTIHLRDVNAAKNILRIGHNALLMESSNLGKMSKTMDKKQNDIDTGNG

SEQ ID NO: 2447 - protein, 390 aa, unidentified
  REGION 1..390: note = Description of Unknown: uncultivated organism sequence
  REGION 1..390: note = Category: MG81 effectors
  REGION 1..390: note = Description: MG81-730 effector
MNDPLMPLSFTRTLKFKVKAESYAWLNAAAVEVNQVFNFANQASYDARRRTDLKSKWLSGFDLCNLTSGATEYFERIGADTIQQVCTHYAQKRTAAKRLKLRWRVSRGARRSLGWMPFKAASLRRRGNALRFCGKTFRVFERERLADVKWRDGCFAQDAVGDWWLCLPVIVTAEQTIAPLESVGIDLGLKTIATTSDGEKLEAGRWTAGNAEKLAAAQRRGHKKQAKRIHRHTANQRKDALHKFSRKIVDSYQTIVVGDVSSTKLVKTKMAKSVLDSGWGMLKAQLQYKGQQAGRSVSVVSERNTTRACSSCEAFTGPAGLDMLVVRRWDCPACGAEHDRDINAARNILIAGSRCLTSVSGNESSDSPVPSSRLRKRRRETGTETARTAA

SEQ ID NO: 2448 - protein, 351 aa, unidentified
  REGION 1..351: note = Description of Unknown: uncultivated organism sequence
  REGION 1..351: note = Category: MG81 effectors
  REGION 1..351: note = Description: MG81-731 effector
MILVYRYRVKSPTKILDEQSRAVNYVWNFCNESQKSCLRLGKRWLSGFDLDYLTTGTSKELGLHSGTINSVCDQYAKSRKQKKRPFLRWRGKKSLGWIPFKGRNLKWKGDAFVFGGNTFRVFFSRPIPDGAIIRDGSNFSQDARGNWFLNVVLRLPDNPRRGIRTSVGIDLGLHDLAALSTGEKIENPRHLAKLADKLARAQRAGKKKQATNIHAHVKNARRDFQHKLSTCLVKQFDAIYVGNVSSSKLSKTRLAKSVLDAGWSSFRSMLAYKCDYAGGRFSEVNESFSTQVCSSCGCLPEGRPKGIADLGKRQWDCVECGSHLDRDLNSALNILHAGSGHRSPAEGIPAL

SEQ ID NO: 2449 - protein, 389 aa, unidentified
  REGION 1..389: note = Description of Unknown: uncultivated organism sequence
  REGION 1..389: note = Category: MG81 effectors
  REGION 1..389: note = Description: MG81-732 effector
MAEPILTQTIGVTLKLRPTCAQAATMQRWLWHLTAVYNWAVKTIERDAERRVYRSTFDMYALVNGHSRRLEIPRSAIRGTIGTAHNAWQRAFHRVSRRPKLKGRRRPLNSIAFSQANKRPIRGRRIYLAGLGEVRFHEQAIPDGKIVCLRVVKRASGWYVCLFMNAAPRTIPRVAAGQIGIDPGFSSLLTLSSGELIEHPKELKVAALRLAQAQRGKRRRLTARIQERIANRRKNRNHHLSRQLVAENTFIAFSKDRIKAIEKRFGKSTASAAHAQLRSQLRYKSLTGGTKFIEVPSRNSTRTCSACGALTGPTGWSGLTVRQWTCGCGAEHERDVNAARNTLFAALGTSVESRREAASGIASKATSRGSCLVAWGPLPCTTADLSTPI

SEQ ID NO: 2450 - protein, 913 aa, unidentified
  REGION 1..913: note = Description of Unknown: uncultivated organism sequence
  REGION 1..913: note = Category: MG81 effectors
  REGION 1..913: note = Description: MG81-733 effector
MSYLAAKYIDLGKGVYHFTMKDKLDMLNKNEAVTDLRFGIVSEKYEKGITSFDYERIKAEEELDRNIAAYVTFAADIFAKSVIKSDYRTKKDNNSDVLQYSDKEFRNSEVIRDNAEKNILQYWGGYSRWGTENSKLPENNKVSDFGKLDVSDLCIDIKKHLAGIRNSSVHYTTKIKNESAADGSNVKILFEKDLADINIIYADKYYSNNVWMFYSLEDINKLIAFLYKEKRVIRQVQIPSFSRILKRKAMQDVINEIFKDDFDENIVNPELKEKYRNSLYFMLKEIYYNAFIIQPELKEKFKDKIKTMKSELYNKLKTIDKKEYKALYCMLSNEESALKNFADRIYSVDGDNVSFADICKILMTDYNMQNQEKKNIESMEQKKKNKGKDENYKHFPLLLHKVLKELFIEYLKQTHELEFLRNNICIKSDVTMESFESQIKGVEIYKDLKEKIDKNNSLLDWYVIAHFLMPKQLNHLIGNIKNYIQFATNIDKRAESVKNLTGSGMVKRIQYYDDIVRTLEFSAQYIGKISNNINDYFNSEDEYVSFLSKYVGFINDKSEDVLTELKDFCREKINNGSQIIGIYYGGDNVIINRNVIYAQMYSNAEVFSNIYKKVTKNDIINYYEKQNDLKDVFKSGVCQNEDEQRSLCEFQQLKNRIELTELSTYADMVNDFMAQFVEWAYLRERDLMYFQLGIHYIRLFYSDNVLDEKYHKLSDNVIDIEEGALLYQIVAMYDYELRIFETDNSGNAKRIGQGGPGKSIPVFLKKYCNVTDVYECGLELFEDINQHEHIIRFRNDIAHMRYMSNQAMNIMSIVSNIYKSFFVYDTKLKKSISLVFKNILMRYGVIADLVFSYNNKNQSIKDDMDINIINIKNLKSDKYVYKIVNEDIVKQVEIEIRNQVFLEQLHNLLYFSR

SEQ ID NO: 2451 - protein, 364 aa, unidentified
  REGION 1..364: note = Description of Unknown: uncultivated organism sequence
  REGION 1..364: note = Category: MG81 effectors
  REGION 1..364: note = Description: MG81-734 effector
MNIQIKTLKVRIRDKHADVLNRMSFEVNQVWNAANETSAEFAWVPVPEVGYMNMQTSGFDLMKELKGIRKERSMIISARTVQEVIAVHAKTRKQFKKDKLRWRSSGGARRALGWVPFKSGSACWINGQVRFCGIYFKCWDSYGLSQYDFRSGCFSEDSRGRWYFNIVVHVEEEVRLSEGGQIGIDLGLKTTATCSNGVVLERKQFYRNLEEKLGKAQRANKKKLVKTIHAKIKNQRLDANHKFSRKIVNENSLIVVGNVSSSGLAKTKMAKSVLDAGWFMLKTMIDYKSKAMQSAFIEVNEAYTTQACSCCGCISSSSPKGRRDLDVREWTCAECGTEHDRDINAAKNILSLGHQRLAVGILSL

SEQ ID NO: 2452 - protein, 511 aa, unidentified
  REGION 1..511: note = Description of Unknown: uncultivated organism sequence
  REGION 1..511: note = Category: MG81 effectors
  REGION 1..511: note = Description: MG81-735 effector
MAKCSTDTCCLTLPLRLEKWQEDRLAKRFEIARQIYNTMVRAELKKLRAMEQSEPYKANQEKIQALDWKTQTDKQALKALYKERDKLLRDGGFSEYGFKSDIKNYYKHFNNNIGSNVAFHGIAPQVWAAFEKMLFKKEGKKVHFKKKGDIHSLRGYSAAGKSGGVEIIFRETYIEWKGLKLPLKLSPDNIYETQMLSYRVKYVRLLRKPGKRKDRWYAQLSLEGKPVIKYNPKTGEVRHPIGKGAVGLDIGPQTLAYSAATGADLVELANQVQNVEQEKRRLQRKLDRSRRATNPGNYADDGTIRRGIALTHNKSKRYLRTQQELKYLQHQQAEIRKRQHTELANHLLSLGDCFYVEKMVWTSLTHRAKETEISEKTGKIKRKKRFGKSVANKAPATLIGILQRKSAALGIAGVIEVPTSVKASQYNHQSGTYTPKPLSQRWNNMPDGERIQRDLYSAFLLQHYDPQTNTFDANSLHQDYPQFVQYHHDAVLRLYAMPKTPSSMGIKRSLR

SEQ ID NO: 2453 - protein, 511 aa, unidentified
  REGION 1..511: note = Description of Unknown: uncultivated organism sequence
  REGION 1..511: note = Category: MG81 effectors
  REGION 1..511: note = Description: MG81-736 effector
MAKCSTDTCCLTLPLRLEKWQEDRLAKRFEIARQIYNTMVRAELKKLRAMEQSEPYKANQEKIQALGWKTQADKQALKALYKERDKLLQDGGFSERGFKSDIKNYYKHFNNNIGSNVAVHGIAPQVWAAFEKMLFKKEGKKVHFKKKGDIRSLRGYSITRKSGGVEIIFRETYIEWKGLKLPLKLSPDNSYETQMLSYRVKYVRLLRKPGKRKDRWYAQLSLEGKPVIKYNPKTGEVRHPIGKGAVGLDIGPQTLAYSAATGADLVELANQVQNVEQEKRRLQRKLDRSRRATNPGNYADDGTIRRGIALTHNKSKRYLRTQQELKYLQHQQAEIRKRQHTELANHLLSLGDCFYVEKMVWTSLTHRAKETEISEKTGKIKRKKRFGKSVANKAPATLIGILQRKSAALGIPGVIEVPTSVKASQYNHQSGTYTPKPLSQRWNNMPDGERIQRDLYSAFLLQHYDPQTNTFDANSLHQDYPQFVQYHHDAVLRLYAMPKTPSSMGIKRSLR

SEQ ID NO: 2454 - protein, 351 aa, unidentified
  REGION 1..351: note = Description of Unknown: uncultivated organism sequence
  REGION 1..351: note = Category: MG81 effectors
  REGION 1..351: note = Description: MG81-737 effector
MLHTKTLKVRVRDKHAPLLRQMARSVNFVWNYLNELSQRSIRERGGFLSAYDLHPYTKGAAKELGLHSQTLQCIAAEYVTRRKQFKKVRLNWRKSAGVRRSLGWIPINTGAASWKNGQVYHNGHYFKVWDSYGLAGHKFRSGSFSEDSRGRWYFNVVVDVEESVSMGQGSVGIDLGLKDIATCSDGRQLENNQFYRGMQQKLAIAQRSRNKARTRAIHAKITNRRKDALHKFSRKLVDSYGTIIVGNVSPSKLVKTKMAKSVYDAGWSMLKTMLEYKCDHAGIVFKEVNEAYTTRACSACGSLTGPRGVNGLRIREWTCCECGVAHDRDINAARNILALGHERPSVGIPVL

SEQ ID NO: 2455 - protein, 367 aa, unidentified
  REGION 1..367: note = Description of Unknown: uncultivated organism sequence
  REGION 1..367: note = Category: MG81 effectors
  REGION 1..367: note = Description: MG81-738 effector
MYQVLRLRIYRKHNAKLNKLASAVNFVWNYVNDLCLQMWQRKRVFPSAYDVAEYTKGAGEYLGLHSQTIQFIGEKHHQSRKQHKKVKLAWRTNRPDAKRKSLGWIPFKASAVKVLRTYNTGKTALKSQVQLSCGKEKLILTVYDQYDLRRYSGFRTAEIVQDSCGDWYLCLLVKVEPKICTAIGEVGIDYGCKTAATCSNGDKLETKFTRQYAEKLATAQRARKKKQARRIHRKIKNSRADATHKFTSKLVRENRLIIAGNVKSSSFTSGKLAKSVYDANWFAINRQLEYKSRRAGCQFIVVDENFSTQTCANCLQITNSSPKGVAGLGIREWICDCCGQLNDRDVNAARNILRFGRETLAEGSPVF

SEQ ID NO: 2456 - protein, 347 aa, unidentified
  REGION 1..347: note = Description of Unknown: uncultivated organism sequence
  REGION 1..347: note = Category: MG81 effectors
  REGION 1..347: note = Description: MG81-739 effector
MLQVQLKLRPCKAQEQIYDQWLYNLASVYNFAVRKIELNAKDKIYFSKNDFQNLLANHGEKLGIPSHTIQGVLCTVHDAWKRCFKKTAGKPKLKGMRNKMSSIPFPDPIKAPKGNRITLPGLGSVRFHKQEISEGKIKCGRLIKRASGWYLCLFIDAEPNPIKRLAFGAIGIDPGFSNLLTTSDGEVIEHPRELEAAAERLGQAQRGHNKQLAARIQERIANRKKDRNHKLTTKLVSENVLIVWSKDAIKGIAKRFGKSVNSSSHAQIRQMLSYKMPKSGGTFIEVASKYSTKTCNECGNPTGPTGLAELSVRRCSACGAEHDRDVNAARNTLFAGAGCAHEELAYV

SEQ ID NO: 2457 - protein, 365 aa, unidentified
  REGION 1..365: note = Description of Unknown: uncultivated organism sequence
  REGION 1..365: note = Category: MG81 effectors
  REGION 1..365: note = Description: MG81-740 effector
MDNQLPTKTLKLRIRDKHSNFLLAQSKEVNLVWNYVNDLSMQILKREQRFCSAYDLSKYTAGATKAGLSLHSQTVQAIGDEFVTRRKQFKKVKLKWRKSGGSKRSLGWIPFKSSAIRYKNGQVFYCGKAIGLWDSYGLSKYQLGTGSFSEDSRGRWYLNVTVKVNQKTESGGQLTGVDLGCKEAATASDGSQVHGRRYRALEQKLALAQRARNKYRIKNIHAKIKNQRKDDLHKFSSALVKRSGAIFVGNVSPTGMAKTKNAKSSLDAGWGILKSMLEYKCRWADVVFGEVNEAYTTQTCSCCGSISSSSPKGRADLGIRSWTCVVCGTHHDRDINAGINIAKRGESQFLVGAGHCPPVVGIPVL

SEQ ID NO: 2458 - protein, 347 aa, unidentified
  REGION 1..347: note = Description of Unknown: uncultivated organism sequence
  REGION 1..347: note = Category: MG81 effectors
  REGION 1..347: note = Description: MG81-741 effector
MLLAYRYRVKSLEGLLKAQSRAVNFVWNYCNETQKSALKWNKRWPSGFDLNKLTAGTSKELRLHAGTINSVCEQYANSRSQKKRPYLRWRGKKSLGWVPLKGRDLRREGDAFRFAGNTFRVFYSRPLPDGKIKDGTSFSCDARGRWFLNIVIEVAAATPRQVAAAIGIDLGLKDFAALSTGETIGNPRHLRKLAVDLAIAQRAGKKGRARSIHAKISNARADFHHKLSFRIVREFDYIAVGNINAAGLAKTNMAKSVLDAGWSSFRNQLRYKAIKHGAWFAEVSEYGSTRVCSSCACETGPKGVKDLGIRIWICSECGTSHDRDTNAALNILFRSGHRTPVEGIPVL

SEQ ID NO: 2459 - protein, 390 aa, unidentified
  REGION 1..390: note = Description of Unknown: uncultivated organism sequence
  REGION 1..390: note = Category: MG81 effectors
  REGION 1..390: note = Description: MG81-742 effector
MKSNNTLMPPLLMRTLRLKVRSEAYPWLNAAAIEVNAVFNYCNETSYKAATRTDLKRKWLSGFDLCSLTAGASQYFEKIGSDTIQSVCVQYAQNRKAAKKLKLKWRVSRGAQRSLGWIPFKAAALKRKGRGVRFAGKCIRVFERERLEGAKWQGGEFAQDSVGDWWLCLPVKVQAEETIAPQEAVGIDLGIKCIAATSDGDRLEAGRWTRRYAEKLASAQRRGHKRQAKRIHRKVARCRADALHKFSRTMVDRYQHIVVGDVSSLKLVKTRMAKSVLDSGWGTLRRFLAYKCEHAARGFEVTDERYTTVTCSHCGALSGPRGVNGLIVRFWVCRNCGELHDRDVNSARNTLIGSRCRTSVCGNKLSYSLISPSNAYRVREAEIELARTAA

SEQ ID NO: 2460 - protein, 351 aa, unidentified
  REGION 1..351: note = Description of Unknown: uncultivated organism sequence
  REGION 1..351: note = Category: MG81 effectors
  REGION 1..351: note = Description: MG81-743 effector
MKTFKFRLKRRNTAKLEKMAGAVNFVWNYANQTSVEYLDKFGKWLSGYDLNYLTVGCSKDLGINANSVQFVCEELAKRRKQSRRRKLSWRSQKRSLGWVPFKQDGILIKDDVITYYGNQFKFWKSRQIEGKIRGGSFTQDSKGNWYINIVCEVPRSIRIADNREVGIDLGLKTLATLSDGNKIDRFNITDKYADRLAMAKRANKKKRATAIHAKIKNTRKDFNHKETTKLVNNYGKIFVGDVSPSKLMKTNMSKIVTDVSWCDFKSMLAYKAIALGVEYKEVKENFSTVTCSTCFERTGPSGLSALGVREWTCKCGATHDRDVNAAKNILRFGHETPIKGSPYYKRNVSKR

SEQ ID NO: 2461 - protein, 511 aa, unidentified
  REGION 1..511: note = Description of Unknown: uncultivated organism sequence
  REGION 1..511: note = Category: MG81 effectors
  REGION 1..511: note = Description: MG81-744 effector
MREDSQNTCCLTLPLKIEKWQADRLIKRFEIARQIYNTLVHAELKKLQKMEASAEYRQIQDRIRELNPSDVRAKKEWKILKDKQEKLWKAWKITEYGFKSDIKAYYKYFNENIGSAVATHDIAPRVWAAFEKKLNDRTGKVKIQYKKAGDIRSLKGFSVSGKSGGTEIIFHKTYIAWKGLTLPLKLSPDNAYEKEMLMRRIKYVRILRKPGKHKDRWYAQLSLEGNPVVKLDPVSGLPRHPIGKGAVGIDIGPQTLAYSAEGGADLVELADQVQCIEQEKSRLQRKMDRSRRASNPDNYAQDGTIKRGVKLTHNKSRRYCKLQKELAYMLYRQAETRKRQHRELINRLLTMGDCFYIEDMHWNSLAHRAKKTEISEKTGRYKRKKRFGKSIANKAPAMLVDMLEQKCKSLELDVVMVNTSLKASQYNHQTGKYEKKTLSQRWNHMPDGEQIQRDLYSAFLLQHVVPEKNAFDNEALCRDYPKFVQYHHEVIERLRSLPKTISSMGIRQSVS

SEQ ID NO: 2462 - protein, 353 aa, unidentified
  REGION 1..353: note = Description of Unknown: uncultivated organism sequence
  REGION 1..353: note = Category: MG81 effectors
  REGION 1..353: note = Description: MG81-745 effector
MKQTKTLRVRVRDKHAPLLRQMARSVNFVWNYLNELSWRAIRERGVFLSAFDLHPYTKGAGKELGLHSQTLQCIAAEYVTRRKQFKKSRLRWRKSGGARRSLGWIPLNTGAASWKHGQVFHNGHHFKVWDSYGLGDFRFRSASFSEDARGRWYFNIVVDVGTQLGTGQGVIGVDLGLKDVATCSDGRKLENGRFYRDLEAKLAVAQRAGNKERARAIHAKIANRRKDALHKFSRQLVNQHAEIYVGDVSSQKLTQTRMAKSVLDAGWGQLKAMLAYKCAHAGIVFKVVDERYTTQTCSCCGAKPDSRPRGIAGLGIREWTCSECGVTHDRDINAARNILAAGRGRPVVGIPVL

SEQ ID NO: 2463 - protein, 397 aa, unidentified
  REGION 1..397: note = Description of Unknown: uncultivated organism sequence
  REGION 1..397: note = Category: MG81 effectors
  REGION 1..397: note = Description: MG81-746 effector
MAAPVNAPHTTRVLRLRLKDRHADALRALAGEVNFVWNYCNELSTKGFQRERRFIGAYELHKYLSGAGKDGLQLHSQSVQAVADEFARRRKQFKKVKLRWRVSRGARRSLGWVPFKASAIQYKNGQVHLAGTPLSLWDSYGLSRYELGAGNISEDARGRWYLNVTVKSPGWPKSRNLEQVQGDAVGIDLGLKDFLATSEGELVEAQRFYRDLEPALAGAQRAHRARRVKALHAKIANRRKDFLHKLSTGLVRQHQAIFVGDVNARALARTTMAKSVLDAGWSAFRTMLQYKCDDAGVWFSEIDEKFSTQECGACGARTGPRGREGLSVRSWECSRCGTQHQRDVNSATIIRNRGLVWLEKAFSTPGEARADEAGVNEGALRAPAAGHGRPDVGIPAL

SEQ ID NO: 2464 - protein, 512 aa, unidentified
  REGION 1..512: note = Description of Unknown: uncultivated organism sequence
  REGION 1..512: note = Category: MG81 effectors
  REGION 1..512: note = Description: MG81-747 effector
MPTKQKEDSNRCVLTLPLLTEPWQEHIIEKRFKIIEHLKNQLISIELRKLKKLQRTKAYKNLIKQIESVPKSERTVLYKERNKMLKDAGFSQYTFMDDMAGKKSLMQKHFESHINVQIAHKAAIDVWSSFEKFLFGTGQIVHYQKRGTLSSVASKSPKTGMFYYPDENIFKWSGGGTKPKGGIILCLRVASVKTNYEKEMVANNEIKYYRVVRKWMKTKYKYYLQITFAGKPADKHREISTGRVGIDIGTQTIAIASDKSVKLLELADKVNKNHIKKCELQRKLDRSRRYTNPDNFNPDGTVKRGTKGHKLKWNKSKHYLEIAGKIRELERKNADIRKYQHTCLANDILAMGNQIYIEPMNYKGLQKRAKETQVDEKGRYKKKKRFGKSLANKAPAMFVTILKTKAEQHGGEVYEVDIMSYRASQCDHTTGEYTKHGLNDRWRILGNGDKVQRDLYSAFLIKNSNKTHDEIDLDKCSKTYDSFKKLHDKEIENIRNEVILRKRRNISSYGIA

SEQ ID NO: 2465 - protein, 349 aa, unidentified
  REGION 1..349: note = Description of Unknown: uncultivated organism sequence
  REGION 1..349: note = Category: MG81 effectors
  REGION 1..349: note = Description: MG81-748 effector
MLQVQLKLRPCKAQEQIYDQWLYNLASVYNFAVRKIELNAKDKIYFSKNDFQNLLANHGEKLGIPSHTIQGVLCTVHDAWKRCFKKTAGKPKLKGMRNKMSSIPFPDPIKAPKGNRITLPGLGSVRFHKQEISEGKIKCGRLIKRASGWYLCLFIDAEPNPIKRLAFGAIGIDPGFSNLLTTSDGEVIEHPRELEAAAERLGQAQRGHNKQLAARIQERIANRKKDRNHKLTTKLVSENVLIVWSKDAIKGIAKRFGKSVNSSSHAQIRQMLSYKMPKSGGTFIEVASKYSTKTCNECGNPTGPTGLAGLSVRQWECNVCGAQHDRDINAAINTLAAAAGCAVEGYAYV

SEQ ID NO: 2466 - protein, 413 aa, unidentified
  REGION 1..413: note = Description of Unknown: uncultivated organism sequence
  REGION 1..413: note = Category: MG81 effectors
  REGION 1..413: note = Description: MG81-749 effector
MESSHARTFMLGWRLLRRPRKAMQPQDPTRPRIHSVTRTLRLKVKTESYAWLNTAAYEVNQVWNWSAEVSEKAARPCTGERKWLTGFDLNNLSAGASEYFDKIGADTIQRVNGEYAEQRRIAKRIRLRWRTSRGPRRSLGWVPFKAASLKRKGRSLRFCGKTFRVFEPERLEGVKWRQGEFAQDAVGDWWLCLRIKIQVEESVAPLEKVGIDLGLTEVAVTSDDARCEKSCFYRGIEQKIAQAQRRGHPRQAKFLHRRAANRRKDALHKFSRRIVNEYEKIVVGDVSSTQLVKTRMAKSVLDAGWGMLRTYLQYKSQQAGRTFQIVNERNSSRTCSNCDALTGPQGVNGLRVRRWTCAACGVSHDREVNAARNHLRRAELPASVRKRVIVLAGSAEPSIPLAQGRTEPVRTVA

SEQ ID NO: 2467 - protein, 378 aa, unidentified
  REGION 1..378: note = Description of Unknown: uncultivated organism sequence
  REGION 1..378: note = Category: MG81 effectors
  REGION 1..378: note = Description: MG81-750 effector
MHGASCTKTKVLRLRLKDKHAMFLRHLAGEVNFVWNYCNELQITMFNRERRFLSGYDFAKFTRGATKEGLHLHSQTVQAIAEEYATRRRQCRRVRLSWRKSTGRRRSLGWIPFKKTAIQAAHGQVKFAGRWLSLWDSYGLDAYPIRAGTICEDARSRWYLNACVAVPVAEPRSSARRDVGIDLGLKDLVATSDGEKVSAPQFYRGLEPKLAIAQSAGKKDRVRAIHAKIANRRKDSLHQFSTRLVRGYDTIFVGNVNTSALAKTSFAKSVHDAGWSAFRTMLRYKCDFAGATFAEVNEAFSTRTCSACDSRSGPKGIAGLGIRAWKCSKCGAVHDRNVNAAKNILAAGRRRLAEGIPALLGRGRTSNCGETVRRTILC

SEQ ID NO: 2468 - protein, 351 aa, unidentified
  REGION 1..351: note = Description of Unknown: uncultivated organism sequence
  REGION 1..351: note = Category: MG81 effectors
  REGION 1..351: note = Description: MG81-751 effector
MIQVQLKLRPNVKLEKRLDEWLWHLTGVYNWAVRKIQLDADDKIYHSPMNFQNLLAGHAKKVGVPGHCIQGVLSTVHAAWQRCFRKQGGRPKLKGQRNKLVSIPFPDPIRCPEGSHVKLPVLGLVRFHKQFLPEGRIKCGRLIKRASGWHLCLFIDAAPKEIERVGFGKIGIDPGFKSLLTFSTGEKVEHPRELEASAKRLAQAQRGKDKKLVARIHERIANQRKDRNHKLSRKLVAENTVIRFSKDNIKGIAKKFGKSVTSSGHGQLRAMLAYKSSHIGGTQYDEPASKNSTRICSNCGCLSGPTGWAGLSVRNWVCQECGSLHDRDQNAAINVLNFGAGTALERGLCQI

SEQ ID NO: 2469 - protein, 556 aa, unidentified
  REGION 1..556: note = Description of Unknown: uncultivated organism sequence
  REGION 1..556: note = Category: MG81 effectors
  REGION 1..556: note = Description: MG81-752 effector
MATRKKHIRTPYEDERKKHRAAASRHVLALEAQIKEDDKRKLFHIANDLRVYGNHLTNIAQKRVSQLFRTKAYREALKQYHNASSVLSSLDKGTPKYHEAKEKVKDAADVLERLQAQYKLTMEDLRHDMAGISKGGKIKAVFLLSETENVWAAVQSVLYKSGKHLNYAKRGELPLIRAKQIERGITLSFVNGVPRCKMGAIDDFALIVKKNDSFAKNELACIEAFVSDLETEKKAVAIFSKTGIPQNTYRPCFVALKCVTIRGKLRVYAHITVEGDPIPKYTKSGCLKHPCGKGLVGVDLGPQSVAAVSETSVILENLAERNGKSTKRHERKERLFLRALDRSRRANNKDRYNEDGTVKKGVHKPWKKSKQYRIKEACLKELRRKNALSRKYANNELANRIRAMGDDITIERSNVKALQKKAKPSVPEQGKKQKRRKRFGHSILHRCPGHLYAQLHSKFSENHFHVVDNMYRASQYDHKSNSYNKKKLSQRWHKFEDGTKVQRDIYSAFLLLCHNDDFKTINQDICILKYETFKKAHDKCISDIKTSGQKVCNSGI

SEQ ID NO: 2470 - protein, 383 aa, unidentified
  REGION 1..383: note = Description of Unknown: uncultivated organism sequence
  REGION 1..383: note = Category: MG81 effectors
  REGION 1..383: note = Description: MG81-753 effector
MPLSFTRTLRLKVRRESYAWLNAAAVEVNEIFNYCNETSLKAATRTDLKRKWMSGFDLCNLTAGSSQYFDKIGADTIPSICTHYAQKRQAAHRVKLRWRVSRGTRRSLGWVPFKAASLKHKGVCLRFAGKCFRVFERERLEGVKWQGGCFAQDAIGDWWLCLPVKVAAEETVAPEQAVGIDLGLKDIAATSDGGRLRAGHWTQEYAQKLAAAQRCGHKRQAKRIHRKVARCRTDALHKFTREIVDRYQKIVVGDVSSLKLVRTRMAKSVLDSGWGMLKRFLEYKSQQAARTFEVVNERNTSITCSTCGALSGPRGANGLIVRSWVCRDCGELHDRDVNAARNILIGSRYRTSMRGNESSPWLIPPSNAYCVREAGMESAWAAE

SEQ ID NO: 2471 - protein, 367 aa, unidentified
  REGION 1..367: note = Description of Unknown: uncultivated organism sequence
  REGION 1..367: note = Category: MG81 effectors
  REGION 1..367: note = Description: MG81-754 effector
MIQVQLKLRLRPAQERQLERWLFRLTGVWNWAIRKLEADGNVGVRHSVFEMKALVNGHGRKIGVPSKAMTALVAQACDAYDRYRGGLANRPRLKGRRNKLNSIPFDQGQLIRSDRSVYLAGLGLARFHPQEIPAGHSGCSRIVKRASGWYLCLFIQAEREPIAVVVDGLIGVDPGFSNLLTTSDGEIIEHPDELRAGELRVAQAQRGKRERLSARLRERGANRRRDRNHKLSRRLVAENRLIVWSKDNTAGIARSFGKSVSSASHSQLRQMLAYKSRAGGREFVEVASRNSTRICSACRAITGPTGYAGLSVRRWTCVCGATHDRDVNAAVNTLIAGLGMSHERSREVASGIVIESKPTRFMRGASQ

SEQ ID NO: 2472 - protein, 512 aa, unidentified
  REGION 1..512: note = Description of Unknown: uncultivated organism sequence
  REGION 1..512: note = Category: MG81 effectors
  REGION 1..512: note = Description: MG81-755 effector
MPTKQKEDSNRCVLTLPLLTEPWQEHIIEKRFKIIEHLKNQLISIELRKLKKLQRTKAYKNLIKQIESVPKSERTALYKERNKMLKDAGFSQYTFMDDMAGKKSLMQKHFESHINVQIAHKAAIDVWSSFEKFLFGTGQIVHYQKRGTLSSVASKSPKTGMFYYSDENIFKWSGGGTKPKGGIILCLRVASVKTNYEKEMVANNEIKYYRVVRKWMKTKYKYYLQITFAGKPADKHREISTGRVGIDIGTQTIAIASDKSVKLLELADKVNKNHIKKCELQRKLDRSRRYTNPDNFNPDGTVKRGTKGHKLKWNKSKHYIEIAGKIRELERKNADIRKYQHTCLANDILAMGNQIYIEPMNYKGLQKRAKETQVDEKGRYKKKKRFGKSLANKAPAMFVTILKTKAEQHGGEVYEVDIMSYRASQCDHTTGEYTKHGLNDRWRILGNGDKVQRDLYSAFLIKNSNKTHDEIDLDKCSKTYDSFKKLHDKEIENIRNEVILRKRRNISSYGIA

SEQ ID NO: 2473 - protein, 372 aa, unidentified
  REGION 1..372: note = Description of Unknown: uncultivated organism sequence
  REGION 1..372: note = Category: MG81 effectors
  REGION 1..372: note = Description: MG81-756 effector
MNHTKTLKVRVRDKHAPLLREMARSVNYVWNYLNELSHRSIRERGVFLSAFDMHPYTKGAGKELNLHSHTLQCVAAEYAARRKQFRKPRLNWRKSGGVRRSLGWIPINTGAASWKNGQVFHNGHHFTVWDSYGLGQYRFRSGSFSEDSRGRWYFNIAVDVPEFVGPLQQTESIGIDLGLKEVATCSDGFTRLENARFYRGLEPALAIAQRANKKARIRAIHAKIANRRKEALHQFSRSLLKRCGMIIVGDVSPQKLVKTTMAKSVLDAGWGQLKTMLDYKCAHAGIVFKVVNEAYTTQTCSCCGAISSSSPKGRAGLRIREWTCECGVTHDRDVNAARNILALGLSVPQGESTSFRTGRKSKIRTEGHSRDS

SEQ ID NO: 2474 - protein, 380 aa, unidentified
  REGION 1..380: note = Description of Unknown: uncultivated organism sequence
  REGION 1..380: note = Category: MG81 effectors
  REGION 1..380: note = Description: MG81-757 effector
MLQVQLKLRPCKAQEQIYDQWLYNLASVYNFAVRKIELNAKDKIYFSKNDFQNLLANHGEKLGIPSHTIQGVLCTVHDAWKRCFKKTAGKPKLKGMRNKMSSIPFPDPIKAPKGNRITLPGLGSVRFHKQEISEGKIKCGRLIKRASGWYLCLFIDAEPNPIKRLAFGAIGIDPGFSNLLTTSDGEVIEHPRELEAAAERLGQAQRGHNKQLAARIQERIANRKKDRNHKLTTKLVSENVLIVWSKDAIKGIAKRFGKSVNSSSHAQIRQMLSYKMPKSGGTFIEVASKYSTKTCNECGNPTGLAGLSVRQWECNVCGAQHDRERRYQHPCCCGRMCRRGLRLCVAVQESQTSSLGASNTSLMFSYIRILSRENFNDVKH

SEQ ID NO: 2475 - protein, 347 aa, unidentified
  REGION 1..347: note = Description of Unknown: uncultivated organism sequence
  REGION 1..347: note = Category: MG81 effectors
  REGION 1..347: note = Description: MG81-758 effector
MIICHKYRVKSLTGFLNFQAKSVNFVWNYCNDIQRHALKWGKQWPTAFDLIKLTSGSSLHLGILAKTIEGVCQKYATSRGRCRKRFLRYRGQKSLGWVPISKSSLSILEGGFKFSGKLFRVFDSRQLPPDAKIKDGSCFSKDARGNWFLNIVIEIADLSCREITKGVGIDLGLKEFATLSTGEKINNPHHFRALEESLAKAQRARKKRQAANIHARISSARHDFHHKLSTRIIREFDYIAAGNIKAAGLAKTSLAKSINDAGWSSFRNMLRYKAIGRGAVYEEVSEYLTTQTCHECGSIAGPKGQTGLNERTWICTCGAVHDRDHNAAINILMRGSGHGTPVEGIAV

SEQ ID NO: 2476 - protein, 426 aa, unidentified
  REGION 1..426: note = Description of Unknown: uncultivated organism sequence
  REGION 1..426: note = Category: MG81 effectors
  REGION 1..426: note = Description: MG81-759 effector
MIVLAIALDEIGFEILAHAAEDRPQVFDGPIRQHVASVFGDKDQMDVHLENAMSAGPVVLHFALRPIMFRGMMLTFKYRVKDATVGKHLNRHAWACNQVWNFCVATQREAQRRRQAGLTVRWPSAFDLVKLCTGSGTELGLHSDTVQTICRQFAASRDLHKRCPRFRASGGPKRALGWVPFIPRAVKVDGAHVVYLKRKFHFWKSRDIDGEFKAGSFVQDARGRWYVCFQCEVAEDRPTGNGEIGIDLGLKTLATCSDGTSIPALRHYRQYEAALARESRAGNKRRVRAIHAKIANARRNHLHEWSTKLARENELIVVGNVSPSKLAKTKMAKSILDASWAMLRSQLEYKARRHRARFVEADERWTSQSCSDCGAVGGPKGIAGLGVRHWTCPCCGSSHDRDVNAARNILSVGAERRPPAVEIPVL

SEQ ID NO: 2477 - protein, 366 aa, unidentified
  REGION 1..366: note = Description of Unknown: uncultivated organism sequence
  REGION 1..366: note = Category: MG81 effectors
  REGION 1..366: note = Description: MG81-760 effector
MTEDNTVLKTLKVRVKDNRKNILNRMAFDINQVWNKANEITSEECYEPIPEVGYVFNNISAFDIQKRIKGIRKERDMIIGAGSAQKIIAIHAKARKQFEKVKLKWRTSGGSRKSLGFVPFKSGAIKWVNGQIRFCGYYFKVWDSYGLSKYDFRSGSFSQDARGRWYLSIVVKVQQEKSKGTGQIGIDLGLKTTAVCSDGTTLERKQYYRNMESKLAMAQRANKKKQVKNIHAKIKNRRADTNHKFSTKLVKENSLIVVGNVSSSKLAKTKMAKSVLDAGWYQLKSMLDYKSKGMQVCYVEVNEAYTTQACSCCGCISSNSPKGMDSLGIREWTCAECGTKHDRDINAAENILRLGHQTLAGGIPRF

SEQ ID NO: 2478 - protein, 338 aa, unidentified
  REGION 1..338: note = Description of Unknown: uncultivated organism sequence
  REGION 1..338: note = Category: MG81 effectors
  REGION 1..338: note = Description: MG81-761 effector
MKLLTYKYRIKDSTSKKRLEKMARSVNQVWNYCNEVSILALKSKFVFLTAFDLNKLTTGVSKELGINVETVQATCEEYATRRKQFKKQKLKWRSSKKSLGWVPFKARSIKYLGNGEVKYFGHVFKFWESRSPLNIKCGSFNQDSKGNWHLNLVCEVEDDFLESTGKSVGVDLGLKDLATYSNGEKFSGVKATKKYADKLAKAQRARKKKQVTNIHKKIANIRKDSLHKETSRLVKQYDLIVVGDVSSKKLLKTNMAKSVSDASWDTYKSMLLYKTIRFGKELKVVNESWTSKTCHVCNTVANFGGLSGLSVREWTCSSCNTTHDRDVNAAKNILRLGQ

SEQ ID NO: 2479 - protein, 377 aa, unidentified
  REGION 1..377: note = Description of Unknown: uncultivated organism sequence
  REGION 1..377: note = Category: MG81 effectors
  REGION 1..377: note = Description: MG81-762 effector
MEVEIANCIRTLRLKVKPEAYASLNAAAVEVNRVWNFANETSAKAARPFAGPPKWLSAYDLDKLTAGATKYFERIGSETIQRVNAEFATRHKQVKKTKLRWRSSRGSRRALGWIPFKAVQLKRKGTSLRFSGKAFRVFEQACLSEVKWKCGCFSQDAVGDWWLSLPVEVRAEPTVAQNEEVGLDLGLKNTVATSDGDKLEASNFYRNIEQKISQAQRRGHKRQAKRLHRRAARRRKDTLHKFSRKIVNRYQRIIVGDVSSAKLVKTRMAKSVLDAGWGMLKAQLQYKANQAGKCVFIVSERNTTRACSNCRALTGPAGLDMLAVRAWVCSGCGGTHDRDVNAARNIRFAARCSPSVSGNEPSPSDTPPSQASRLREA

SEQ ID NO: 2480 - protein, 386 aa, unidentified
  REGION 1..386: note = Description of Unknown: uncultivated organism sequence
  REGION 1..386: note = Category: MG81 effectors
  REGION 1..386: note = Description: MG81-763 effector
MFDETVYIDRAEAVLSARAPALCESPMKPDNAPETHIQRQTITFKFRLRDRHAAELNRQARAVNYVWNYVNETQQKAARAHRKWLTAFDLQRLTNGASKELDIHAHTIQRVCRAYDDARKTHKKAWLRWRGRKSLGWVPFNTGHVSFDGADFKFRGVAYTPMHLRDLKPGVKIGAGSFNQDACGHWFLNIPVEVECALSAPLSSVGIDLGLHTMATLSTGEKIEAPRLYRASEEKLGTAQRARKTKRARAIHAKVANRRKDFLHKASAKIAKQFGLIIVGDVSPSKLAKTNMAKSVLDAGWSGFKNMLSYKANYRGGAMVEVSERYSSQTCSACGSLPPSRPKGIAGLGIRRWTCDECGAIHDRDVNAARNIVRAGLRTLVGGAHV

SEQ ID NO: 2481 - protein, 351 aa, unidentified
  REGION 1..351: note = Description of Unknown: uncultivated organism sequence
  REGION 1..351: note = Category: MG81 effectors
  REGION 1..351: note = Description: MG81-764 effector
MILTYKYRIKNRNAKSALRRHVFAVNQVWNYCCAQQRDTESRYRAGAPKRKWASHYDLTRLCKGAGAMLGIHQQTVSGVCRTFAQARDKAKHAPAFRKSYGVKRSLGWIPFEGQSRQIKDGVVTYLGKRFYLWGLKRRPLPATVKGGAFVEDALGRWYVCLTVEIERKPATGDKAIGIDLGLKSFATLDDGRKIEAPRIYRRYEQRLAALQRAGKRCHTKRLHAKIKACRADFLHKVSTELAGQNAIIAVGNVNARALASKSVLDAGWSSFRKMLAYKANDYREVDEKFTTQDCSACGARCGPKGQKGLGIREWECSSCGVSHDRDVNAARNILALARSAPRPVEEYRRAA

SEQ ID NO: 2482 - protein, 339 aa, unidentified
  REGION 1..339: note = Description of Unknown: uncultivated organism sequence
  REGION 1..339: note = Category: MG81 effectors
  REGION 1..339: note = Description: MG81-765 effector
MELRECFQVWRRQRVFLSAYDIHEYTKGAGEELGLHSQTLQVVGETHAKARKQAKRSKLRWRTNRKDAKHKALGWIPFKSSAVKVIRTYTTGQKVLKSQVQLSCGKEKLILTVFDQYDLRQYTEIKTASVVEDSCGNWFLCLVVKIEPAIENTATDEVGIDLGCKTAATCSNGDKLETKFIQQYAEKLAIAQRAHKKNRAKRIHRKIKNKRTDATHKFTSRLVKENRLIVVGNVKSSSFTSGKLAKSVYDANWFAINRQLEYKCEHAGCLFIKVNENFSTRTCSHCLAMPDSAPRGIAGLGIREWICNCCGHLNDRDVNAAKNILRFGRETLAEGSPVL

SEQ ID NO: 2483 - protein, 362 aa, unidentified
  REGION 1..362: note = Description of Unknown: uncultivated organism sequence
  REGION 1..362: note = Category: MG81 effectors
  REGION 1..362: note = Description: MG81-766 effector
MIVLTYKYLVKGKRAKRQLRRASWAVNQVWNFCGQTQRSVQRAWKDGLSPRWPSRFDLAHLAAGTSKDLGIHGQTIQCVAAQFAKSRDQHRKCPRFRHSGGPKRSLGWVPFQAQSRQIEGNAITYLGTTYRFFASRPLPLIVKGGAFVEDARGRWWVCFHVGVANDLPAAPDVAVGIDLGLKTLATLSTGEKYEAPRHYRVWEDRLAVAQRANDKDRARAINAKIKNCRHDATHKWTTEVARNFRMIYVGDVSSSRLVKTRMAKSIYDAGWSGSKHALRYKASRHGGTCVEQDERLSTQICSSCGMLCETRPRGIADLGMREWVCSNCGTHHDRDVNAAKNILAFGLSAQPPVEESRVAHGR

SEQ ID NO: 2484 - protein, 538 aa, unidentified
  REGION 1..538: note = Description of Unknown: uncultivated organism sequence
  REGION 1..538: note = Category: MG81 effectors
  REGION 1..538: note = Description: MG81-767 effector
MDNEEKEKDGATCCLTLPLKLEKWQSDHLEKRFEIARQLYNTLVHAELKKKCQVERMPEYQEIMKMIDTASNQKEKWALEKKRKAFLEENGFSRNAFKADMEKYYKHFNDNIGANVALHGITAQVWIAFDKVFVDNYKQKGKVHFKKPGELCSVQGYSQKKSGGKEIMFREDRIIWNQQGNRDRKKVKREFLLKLSPDNPYEAEMLKRHVKFVRILRKDGKTKPHWYAQLVLEGKPAVKRDPASGAPKHPIGHGVVGIDIGTRTLAYSTDKEVNLLELADRVQNIEQEKRRLQRKMDRSRRATNPENYNPDGTFKRGVKLTRNKSKRYKRIQHQYAMIQHHQADIRKQQHNELANYLLTLGDCFFVENMSYCDLVHRANKTEISEKTGRYKRKKRFGKSIANKAPAMLITMLKQKCQSRGLEGVKEVDTHVRASQYNHQTDTCIEKALENRWNVMPDGERIQRDLYSAFLLQHCRRDLPEYNRKELQKEFGEELYRVFDREALQRDYPQFVAYHHMTIQRLSELPHTIPSMGIRRIIS

SEQ ID NO: 2485 - protein, 355 aa, unidentified
  REGION 1..355: note = Description of Unknown: uncultivated organism sequence
  REGION 1..355: note = Category: MG81 effectors
  REGION 1..355: note = Description: MG81-768 effector
MVTTIKLRLKDKHSTDLSRQSRTVNFVWNFVNETQRESVRRYRLGASGKFLSKYDYAKLCYGTGKELSVASGTIEEITRQYETSRRTHRKPWLRWRGRKSLGWVPFRGRQIRFDGEQFIFAKRKYRPMHLRDTLTPETKVLTGSFNADARGRWYINVTVELPDDTHPRAPDVPVGVDLGLKDLATLSTGAKVHNYKPYREREEELAKAQRANKKKRVRAIHAKIANSRKDTLHKASTEIARNHSLIFVGDVSSKQLARTRMAKSVLDAGWYDFKSMLTYKAIRHGGRMVEVDERYTTQGCSHCGLVGGPKGAKDLGMREWTCSGCGTNHDRDVNAARNILRVGTDTLEGGASNQS

SEQ ID NO: 2486 - protein, 522 aa, unidentified
  REGION 1..522: note = Description of Unknown: uncultivated organism sequence
  REGION 1..522: note = Category: MG81 effectors
  REGION 1..522: note = Description: MG81-769 effector
MKRSSTDTCCLTLPLKLEKWQSDRLEKRFEIGRQIYNTIVHAELKKLRKLERTQQYQEIEQKLENAKQEETKELWKKKRQLLDQNGLSENHFKADMKYYYPHFKDNIASSVAVHGIASQAWTAFEKVLFSKDGKMVHFKKKGELSSLRGYSQAGKSGGIEIIFRGSYVEWKGLKLPLKLSPDNDYETEMLSKRVKYVRILRKEGKTKPHWYAQLVLEGKPAIKRDPASGAPKHPVGHGVVGIDIGTRTLAYSADSKVDLIELADRVQNIEQEKMLLQRKLDRSRRATNPENYKPDGSIKQGVKLTWNNSKRYKRIQHQYAMIQHHQADIRKQQHNELANYLLTLGDCFFVEDMDYRALTRKAKKTEISEKTGRYKRKKRFGKSIANKAPSMLIALLDQKCKSLNLEGVKKVDTAVKASQYNHQTDECKAKELKERWNIMPDGERIQRDLYSAFLLQHCRRDLPEYNRKELQKEFGEELYRVFDREALQRDYPQFVAYHHMTIQRLSELPHTIPSMGIRRIIS

SEQ ID NO: 2487 - protein, 538 aa, unidentified
  REGION 1..538: note = Description of Unknown: uncultivated organism sequence
  REGION 1..538: note = Category: MG81 effectors
  REGION 1..538: note = Description: MG81-770 effector
MNNEEKEKDGATCCLTLPLKLEKWQSDHLEKRFEIARQLYNTLVHAELKKKCQVERMPEYQEIMKMIDAASNQKEKWALEKKRKAFLEENGFSRNAFKADMEKYYKHFNDNIGANVALHGITAQVWIAFDKVFVDNYKQKGKVHFKKPGELCSVQGYSQKKSGGKEIMFREDRIIWNQQGNRDRKKVKREFLLKLSPDNPYEAEMLKRHVKFVRILRKDGKTKPHWYAQLVLEGKPAVKRDSASGAPKHPIGHGVVGIDIGTRTLAYSTDKEVNLLELADHVQNIEQEKRRLQRKMDRSRRATNPENYNPDGTFKRGVKLTRNKSKRYRRIQHQLAMIQHHQADIRKQQHNELANYLLTLGDCFFVENMSYCDLVHRANKTEISEKTGRYKRKKRFGKSIANKAPAMLITMLKQKCQSRGLKGVKEVDTHVRASQYNHQTDTCIEKALENRWNVMPDGERIQRDLYSAFLLQHCKQGLPEYNRKELKKEFGEELYRVFDREALQRDYPQFVAYHHMTIQRLSELPHTIPSMGIRRIIS

SEQ ID NO: 2488 - protein, 578 aa, unidentified
  REGION 1..578: note = Description of Unknown: uncultivated organism sequence
  REGION 1..578: note = Category: MG81 effectors
  REGION 1..578: note = Description: MG81-771 effector
MAFGSKNSTPSFVLTLPLDISLNEQDYLYKEFKKCGTIYNQLVSVTTKMWHQLRKMRKYRELMAAIAKAAPDSDEQKVLFKQREKMLKEYRFSEDAFHKLVVPYARHYAINSHIAQAVASDVWKAWNTFFFSKGKEVHYKRLDDLAAISGKNNFTGIVLRPANFTTSNIESAKRKAQKAVEKRYDDMYGRPDPKDDKKVVLPDEVKPQMEAEIAAAIAKIKPTIGKGNLRIVYGKHEFPVVLRNPKTQTGKYQQEALKCGVKYCRITRKWVKTKWKYYAQFILEGYPPTKCDGNGVMKHPVNQGRIGLDIGTQTLAISGKDICDLRVLAPSARAQARGLTNQIARTQRAMDRSRRVTNPKYYNPDGTIKRLKRQHGHKQRRDWKYSKRYFRLKAKLRDLNRRLADIRKMEHNILANELLQHGNEFVVEDMNYKALQKRSKETKTNAKTGRAHTKKRFGKSLSRCAPAMFISILNKKANRYGGSVIKVSTFETKASQFDHTDESYTKKRLSERMAHLSSGEVVQRDLYSAFLLEYIDTESLEYNTKALNSAFPAFLVMHENTIKHLQKDKSYLPASVGF

SEQ ID NO: 2489 - protein, 482 aa, unidentified
  REGION 1..482: note = Description of Unknown: uncultivated organism sequence
  REGION 1..482: note = Category: MG81 effectors
  REGION 1..482: note = Description: MG81-772 effector
MPEYQEIMKMIDTASNQKEKWALEKKRKAFLEENGFSRNAFKADMEKYYKHFNDNIGANVALHGITAQVWIAFDKVFVDNYKQKGKVHFKKPGELCSVQGYSQKKSGGKEIMFREDRIIWNQQGNRDRKKVKREFLLKLSPDNPYEAEMLKRHVKFVRILRKDGKTKPHWYAQLVLEGKPAVKRDPASGAPKHPIGHGVVGIDIGTRTLAYSTDKEVNLLELADRVQNIEQEKRRLQRKMDRSRRAMNPENYNSDGTFKRGVKLTRNKSKRYRRIQHQLAMIQHHQADIRKQQHNELANYLLTLGDCFFVENMSYCDLVHRANKTEISEKTGRYKRKKRFGKSIANKAPAMLITMLKQKCQSRGLKGVKEVDTHVRASQYNHQTDTCIEKALENRWNVMPDGERIQRDLYSAFLLQHCKQGLPEYNRKELKKEFGEELYRVFDREALQRDYPQFVAYHHMTIQRLSELPHTIPSMGIRRIIS

SEQ ID NO: 2490 - protein, 538 aa, unidentified
  REGION 1..538: note = Description of Unknown: uncultivated organism sequence
  REGION 1..538: note = Category: MG81 effectors
  REGION 1..538: note = Description: MG81-773 effector
MNHEEKEKDGATCCLTLPLKLEKWQSDHLEKRFEIARQLYNTLVHAELKKKCQVERMPEYQEIMKMIDAASNQKEKWALEKKRKAFLEENGFSRNAFKADMEKYYKHFNDNIGANVALHGITAQVWIAFDKVFVDNYKQKGKVHFKKPGELCSVQGYSQKKSGGKEIMFREDRIIWNQQGNRDRKKVKREFLLKLSPDNPYEAEMLKRHVKFVRILRKDGKTKPHWYAQLVLEGKPAVKRDPASGAPKHPIGHGVVGIDIGTRTLAYSTDKEVNLLELADHVQNIEQEKRRLQRKMDRSRRATNPENYNPDGTFKRGVKLTRNKSKRYRRIQHQLAMIQHHQADIRKQQHNELANYLLTLGDCFFVENMSYCDLVHRANKTEISEKTGRYKRKKRFGKSIANKAPAMLITMLKQKCQSRGLEGVKEVDTHVRASQYNHQTDTCIEKALENRWNVMPDGERIQRDLYSAFLLQHCKQGLPEYNRKELKKEFGEELYRVFDREALQRDYPQFVAYHHMTIQRLSELPHTIPSMGIRRIIS

SEQ ID NO: 2491 - protein, 368 aa, unidentified
  REGION 1..368: note = Description of Unknown: uncultivated organism sequence
  REGION 1..368: note = Category: MG81 effectors
  REGION 1..368: note = Description: MG81-774 effector
MYKTLKLRIYTKHTPKLVKLASAVNFVWNYVNDLCLQMWRRNRVFLSAYDVSEYTKGAGEELGLHSQTLQAIGEKHYQSRKQHKKVKLAWRTNRKDAKRKALGWIPFKASAVSHVKTYKTGKKALKSQVQLSCGKEKLILTVFDQYDLRQYTEIKTASVVENSCGNWYLCLTVKVEPAIENTATGEVGIDLGCKTAATCSNGDKLETKFTQQYAEKLATAQRAHKKKQVKRIHRKIKNKRTDATHKFTSSLVKENRLIVAGNVKSSSFTSGKLAKSVYDANWFAINRQLEYKSRRAGCLLIKVNEKFSTQTCSNCLQITNSSPKGVAGLGIREWICDCCGTKHDRDVNAAKNILRFGRETLAGGSSVL

SEQ ID NO: 2492 - protein, 405 aa, unidentified
  REGION 1..405: note = Description of Unknown: uncultivated organism sequence
  REGION 1..405: note = Category: MG81 effectors
  REGION 1..405: note = Description: MG81-775 effector
MKKQDVSSHRRSAPAEAPVKRNEPNAGLFTRTLRLKVRPESYAWLNMAALEVNSVWNFANERASTALGNLGKWLSGFDLNNQTSGATEYMKYIGADTIQRVNGEYAAKRNAARKQKLRWRVSRGAHRSLGWVPFKAASLKRKGNALRFAGKTFRMFESERLDSVKWRQGCFAQDALGDWWLCLPVIAEAAQSVAPREAVGIDLGLKAVATTSDGDALEAARFYRGAEQKIAQAQRRGHKRQAKRLHRKAARRRVDALHKFSRKIVDQYQKIVVGDVSAPKLARTWMAKSVLDSGWGMLKAQLLYKGEHAGRTVEVVDERYTTRACSACGSLSGPQGPDMLVVRRWTCADCGASHDRDVNAARNILRRAEVSASVSGNESCDSLVPPRGKRIRRREAGTKTARHAA

SEQ ID NO: 2493 - protein, 365 aa, unidentified
  REGION 1..365: note = Description of Unknown: uncultivated organism sequence
  REGION 1..365: note = Category: MG81 effectors
  REGION 1..365: note = Description: MG81-776 effector
MLFIHRPGIITVMVQCQIKLCLTRAQEAELDRWLWHFTGVYNWAIRKIGCDAAGGIYYRKRDFQNLLAGHGRKLGIPFHTLQGVLVQVRTASDRCGKRLDKNPRLKGHRNRLNSIPLPDPIKRPDGCRIKVPSIGSIRFHKQDIPDGRIKCGRIIKRASGWYLALSVDAQPNIVRTFKMKAHREVGIDSGYMAIVTLSDGERVDAPKECSAMEKRLTQAQRSGNRKLVEQLHEGIVSRKKDRNHKLSRYLVGTCAVMTFVHDNNQALQQKPGKSVANANIHQLQKMLAYKSSSFGRWFELMDGSWSTRTCSAYGSLAGPKGRHGLSVRRWVSEAYGASHERDIDTARNALISAVGSVVEEARDAA

SEQ ID NO: 2494 - protein, 357 aa, unidentified
  REGION 1..357: note = Description of Unknown: uncultivated organism sequence
  REGION 1..357: note = Category: MG81 effectors
  REGION 1..357: note = Description: MG81-777 effector
MSIVQYQLKLILRPAQERQLRRWLWHLTGVYNWAVRKIELDAADRRYWSTYSLEALLVGHSRRLGIPARVLERTARQGHDAWRRCFSKLGGQPRLKGRRNRLNSIPFPDPIAFFTGRRVRVSGLGSLKCHYQAIPPGRIKASRIVRRASGWYLCLFVEAEPRAIELNGNGEVGIDPGFGSLLTLSTGEKIEHPHELKETAIRLAQAQRGYRKRLTARLQERIGNQRKDRNHKLSRRLVAENAVIGWSKDAHQNIAKRFGKSVASAAHGQLRQMLAYKSRAGGREFIEVPSRNSTRACSACRALTGPTGWRGLKVRQWVCVGCGCEHDRDVNAALNTLIAARGLRVEKPGDGPSGMAA

SEQ ID NO: 2495 - protein, 364 aa, unidentified
  REGION 1..364: note = Description of Unknown: uncultivated organism sequence
  REGION 1..364: note = Category: MG81 effectors
  REGION 1..364: note = Description: MG81-778 effector
MKTLKLRIKDKHANQLNTLAGAVNFVWNYVNDLSFKHLQRTNHFFSAYDIAAYVKGSGELLNLHSQTLQAITETHAKSRKQFKKAKLNWRTNNPKSKRKSLGWIPFKKTAIKYLGVKKAGKKSLKSTIQFSLAKGKKLTIDVWDSYNLALYTINTCELVQGSRGHWYACITVKEYPKIECGTGETGIDLGCKDSAMTSNGEVLKTKVTQQYAKKLGIAQRAKNKQRVKAIHAKIKNTRQDLIHKFTTNLAKTNKIIIIGKLQSKSFTRGKLAKSVYDACWFEIKRQLTYKCENAGCYYDEVNESYTTQTCSCCGSRQNSPKGRTGLGIREWLCECGVTHDRDINAAKNILALGLERLAVGIPSL

SEQ ID NO: 2496 - protein, 349 aa, unidentified
  REGION 1..349: note = Description of Unknown: uncultivated organism sequence
  REGION 1..349: note = Category: MG81 effectors
  REGION 1..349: note = Description: MG81-779 effector
MLQVQLKLRPCKAQEQIYDQWLYNLASVYNFAVRKIELNAKDKIYFSKNDFQNLLANHGEKLGIPSHTIQGVLCTVHDAWKRCFKKTAGKPKLKGMRNKMSSIPFPDPIKAPKGNRITQPGLGSVRIHKQEITEGKIKCGRLIKRASGWYLCLFIDAEPNPIKRLAFGAIGIDPGFSNLLTTSDGEVIEHPRELEAAAERLGQAQRGHNKQLAARIQERIANRKKDRNHKLTTKLVSENVLIVWSKDAIKGIAKRFGKSVNSSSHAQIRQMLSYKMPKSGGTFIEVASKYSTKTCNECGNPTGPTGLAGLSVRQWECNVCGAQHDRDINAAINTLAAAAGCAVEGYAYV

SEQ ID NO: 2497 - protein, 358 aa, unidentified
  REGION 1..358: note = Description of Unknown: uncultivated organism sequence
  REGION 1..358: note = Category: MG81 effectors
  REGION 1..358: note = Description: MG81-780 effector
MIQYQRKLKLTKVQEAQLNTWLFHLTSVWNWAIRKIELDARDKVYYSRKTFQNLLTGHSGKLGIPSHTIQGMLDQTWLSWQRCFKKISRKPRFKGRRNKLNSIPFPDPIKPPLNNRVRMPLLGLVKFHKQDIPEGKINSGRIIKRASGWYLCLNINAQPNVIPHVSDDQVGIDPGYVTLLTLSTGEKIEHPKELQNNLIRLGQAQRGINRKQVARLHERIKNQRKDRNHKISRELVSKNQVIAISKDNLGGLARSGFGKSVGAAAHGQLRSMLSYKCRAGGREYIEVPSKFSTMTCSTCGARSGPTGKSGLKVRYWECNVCGTVHDRDVNAAINTLIAGLGISHESYREVASEIREVA

SEQ ID NO: 2498 - protein, 369 aa, unidentified
  REGION 1..369: note = Description of Unknown: uncultivated organism sequence
  REGION 1..369: note = Category: MG81 effectors
  REGION 1..369: note = Description: MG81-781 effector
MIQVQLKLKLKREQETMINEWFPILTSIWNWAIKKIEKDAADHIYYNKFEFINILAGHNKRLGMPSHTIQAMLKDAHTTWQRCFKKLARAPRLKGQRNRLTSISFPDPIKEAHINRTYVELPYLGKLKYHKQRIPIGKVKCARLVKRASGFYLCLFIDAQSNRIAHKGCELIGIQLSVDGRMALSNGDIIQREAQLQKHLNRLAQAQRGGNKKLVARLHERIANCRKDANHKLSRKIVEQYDTIVVNKDDLKQRARNLGLLVADSANYQLRLMMCYKSENNERKYIEFASKTGTDNAMISTVTCSVCRSPSGPASLTCLKVREWVCVSCGTLHDRDVNTAKNTLIAGLGASHESDASRVRNLLTSHYEL

SEQ ID NO: 2499 - protein, 355 aa, unidentified
  REGION 1..355: note = Description of Unknown: uncultivated organism sequence
  REGION 1..355: note = Category: MG81 effectors
  REGION 1..355: note = Description: MG81-782 effector
MKTLKLRIKDKHCKVLNQLASEVNFVWNYVNDLCFKHLQRKGQFFSAYDVAKYTKGTSKECNLHSQTIQAVTEELVIRRKQFKKAKLKWRVSNKKSARRSLGWIPFKKVAIKYADGYVQYGKHQFKLWDSYGLSKYTVKTGSFVEDSRGRWYVCLVVDSSKQEKLTATKAIGIDLGLKNIATCSDGTVIFNPKFYRQYEQKLGIAQRAKNKKRVRALHAKIKNCRKDHLHKASSILVKNNALIVIGDLSASKLVKTKMAKSVLDTGFSALKTMLKYKCENAGVLFEEVSEKFTTQVCSSCGEITASSPKGRADLRIREWRCCNEKCLSLNDRDINAALNILALGHKRLAVGISLF

SEQ ID NO: 2500 - protein, 355 aa, unidentified
  REGION 1..355: note = Description of Unknown: uncultivated organism sequence
  REGION 1..355: note = Category: MG81 effectors
  REGION 1..355: note = Description: MG81-783 effector
MKTLKLRIKDKHCKVLNQLASEVNFVWNYVNDLCFKHLQRKGQFFSAYDVAKYTKGTSKECNLHSQTIQAVTEELVIRRKQFKKAKLKWRVSNKKSARRSLGWIPFKKVAIKYADGYVQYGKHQFKLWDSYGLSKYTVKTGSFVEDSRGRWYVCLVVDSSKQEKLTATKAIGIDLGLKNIATCSDGTVIFNPKFYRQYEQKLGIAQRAKNKKRVRALHAKIKNCRKDHLHKASSILVKNNALIVIGDLSASKLVKTKMAKSVLDTGFSALKTMLKYKCENAGVLFEEVSEKFTTQVCSSCGEITASRPKGRADLRIREWRCCNEKCLSLNDRDINAALNILALGHKRLAVGISLF

SEQ ID NO: 2501 - protein, 1330 aa, unidentified
  REGION 1..1330: note = Description of Unknown: uncultivated organism sequence
  REGION 1..1330: note = Category: MG81 effectors
  REGION 1..1330: note = Description: MG81-784 effector
MKREKNITIMKISKVNHRRTAVALNGDKSELGGILYEAPVQKDKNGNYNDVIAETGKVVNEALDKKSRLYTPFNNQKVIIDKNLQRYANNLKRCYINFVKQYVNNKSFNYKAMQFIPDIQNPKTNDAVNYRTDRDNVYNKNKYYDKQTKSKSKKFIYEKIVIPQNEQNIVISALVNCSLRKSLRKDVSYKTKSGEIKTYNLPELVKKSMRFYCLEGQREPDEKEKYEMYILFSYMKEDKRTKNTDLLVKSISNQNTKVKVEDIDGNKLLKLSIADTKKKPLWEYLIKYADSSRQRELMYDIRKKIILYVAGIEEYENIKEDSGLSKVSWSKYNISDNKMFFDINSCTDKRKQNLEIKIREANIEHYRNASSKLCDDESIFWFQHFEGVIETLFSKKSKISEERLGCAYICDYLWKDFLSYLATKYIDLGKGVYHFTMKDKLDMLNKNEAVTDLRFGIVSEKYEKGITSFDYERIKAEEELDRNIAAYVTFAADIFAKSVIKSDYRTKKDNNSDVLQYSDKEFRNSEVIRDNAEKNILQYWGGYSRWGTENSKLPENNKVSDFGKLDVSDLCIDIKKHLAGIRNSSVHYTTKIKNESAADGSNVKILFEKDLADINIIYADKYYSNNVWMFYSLEDINKLIAFLYKEKRVIRQVQIPSFSRILKRKAMQDVINEIFKDDFDENIVNPELKEKYRNSLYFMLKEIYYNAFIIQPELKEKFKDKIKTMTSELYNKLKTIDKKEYKALYCMLSNEESALKNFADRIYSVDGDNVSFADICKILMTDYNMQNQEKKNIESMEQKKKNKGKDENYKHFPLLLHKVLKELFIEYLKQTHELEFLRNNICIKSDVTMESFESQIKGVEIYKDLKEKIDKNNSLLDWYVIAHFLMPKQLNHLIGNIKNYIQFATNIDKRAESVKNLIESGMVKRIQYYDDIVRTLEFSAQYIGKISNNINDYFNSEDEYVSFLSKYVGFINDKSEDVLTELKDFCREKINNGSQIIGIYYGGDNVIINRNVIYAQMYSNAEVFSNIYKKVTKNDIINYYEKQNDLKDVFKSGVCQNEGEQRSLCEFQQLKNRIELTELSTYADMVNDFMAQFVEWAYLRERDLMYFQLGIHYIRLFYSDNVLDEKYHKLSDNVIDIEEGALLYQIVAMYDYELRIFETDNSGNAKRIGQGGPGKSIPVFLKKYCNGTDVYECGLELFEDINQHEHIIRFRNDIAHMRYMSNQAMNIMSIVSNIYKSFFVYDTKLKKSISLVFKNILMRYGVIADLVFSYNNKNQSIKDDMDINIINIKNLKSDKYVYKIVNEDIVKQVEIEIRNQVFLEQLHNLLYFSR

SEQ ID NO: 2502 - protein, 352 aa, unidentified
  REGION 1..352: note = Description of Unknown: uncultivated organism sequence
  REGION 1..352: note = Category: MG81 effectors
  REGION 1..352: note = Description: MG81-785 effector
MKTLKLRIKDKHYKVLDQLALEVNFVWNYVNDLGFKHLKRKGEFLSAYDIAKYTKGTSKECNLHSQTVQAITEELVTRRKQFKKAKLKWRVSNKKSARRSLGWIPFKKVAIKYADGYVQYGKHQFKLWDSYGLSKYNVKTGSFVEDSRGRWYVCLVVDKTKQVKSKGNTSIGMDLGLKDLVTCSDGVKLKAPQIYRQYEQKLGIAQRARNKKRVKAIHAKIRNIRQNTLHQFSHKLVNKHAAIFVGNVNAKALARTKLAKSVLDASWTTLRTMLKYKCENASVWYKEVNEAYTTQTCSSCGSRCSSPKGRTGLGIREWQCMECGTFHDRDINSALNILALGHERLAVGIPVL

SEQ ID NO: 2503 - protein, 514 aa, unidentified
  REGION 1..514: note = Description of Unknown: uncultivated organism sequence
  REGION 1..514: note = Category: MG81 effectors
  REGION 1..514: note = Description: MG81-786 effector
MGNSSTDTCCLTLPLKLEKWQEDRLAKRFELARQIYNTLVRAELKKLERVKHSAPYREIQGQIQALDWSNPNDKGALRRLYKARDALLKSAGFTEYSFKSDIKYYYKHFSDNIGSNVAIHGIAPQVWTAFDKVLFNGGKKVHYKRYGDVSSVQGYSKTRKSGGTEIMFRGTYIEWKGLKLPLKLSPDNAYENEMLRYRIKFVRLVRKPGKQKDRWYAQLALEGKPVVKREPVTGEAVHPVGSGVVGLDIGPQTLAYSAPGEAGLVELADQVQNIEQAKCRLQRKLDRSRRATNPDNYSEDGTIRRGVKLTRNKSKRYRKIQNQLKYLQYCQAETRKRQHTQLANYLLSLGDSFYVEDMPWPALARRAKETVVSEKTGRIKRKKRFGKSIANKAPATLTRILNQKCTSLGLPGVVEVPTSVRASQYNHQTGEYIKKPLSQRWNNMPDGQRIQRDLYSAFLLQHYDPGTGTFDSASLQRDYPQFTQYHHQAIQHLLSMPKTLSSMGVRQSVRQYKA

SEQ ID NO: 2504 - protein, 381 aa, unidentified
  REGION 1..381: note = Description of Unknown: uncultivated organism sequence
  REGION 1..381: note = Category: MG81 effectors
  REGION 1..381: note = Description: MG81-787 effector
MLIIFVNKGSTSLIQVQLKLKLTHTQETMIQEWFPILTSIWNWAIKKIELDAADHIYYNKFEFVNMLANHNKRLGIPSHTIQAILKDAHTTWQRCFKKLARAPRLKGQRNRLTSVSFPDPIKKAHVNSTSIELPYLGKLKFHKQIIPSGNIKCARIVKRASGFYLCLFVDAQSNRIAHKGCEAIGIQLSVDGRMALSNGDIIQREAQLQKHLNRLAQAQRGGNKKLVARLHERIANCRKDANHKLSRKMVEQYDTIVVNKDDLKQRARNLGLLVADSANYQLRLMMCYKSENNDRKYIEVASNTSTAGATISTVTCSVCRSPSGPTSLTCLKVREWVCVSCGTLHDRDVNTAKNTLISGLGASHESAAKRVRNLLTNHYEL

SEQ ID NO: 2505 - protein, 348 aa, unidentified
  REGION 1..348: note = Description of Unknown: uncultivated organism sequence
  REGION 1..348: note = Category: MG81 effectors
  REGION 1..348: note = Description: MG81-788 effector
MIQAQLKLRLNTKQDAILTGWLWNLTGVWNWAVKKIELDAKDKIFYSPKEFHNLLAGHSEKMEIPSHTLQGMLSQAHLAWSRCFKKLAKKPHLKGLRNKLNSIPFPDPLRAPVGNHIAVPGLGSVRFHRQDIPEGKIKCGRIVKRASGWYLCLFIAADREPIAHTAHGQIGIDPGFKSLLTTSEGEIIEHPRELEAGAQRLAQAQRGNDRTLAARLQERMGNRRKDRNHKLSRQLVAENDLIAFSADNHKGVANKFGKSVSSSSHYQLRRMLSYKSRAGGTEYVEVDSKFSTKTCSNCGSLSGPTGWAGLSIRQWRCTECGTLHDRDVNAARNTLQAALGTRVEVCCA

SEQ ID NO: 2506 - protein, 538 aa, unidentified
  REGION 1..538: note = Description of Unknown: uncultivated organism sequence
  REGION 1..538: note = Category: MG81 effectors
  REGION 1..538: note = Description: MG81-789 effector
MNNEEKEKDGATCCLTLPLKLEKWQSDHLEKRFEIARQLYNTLVHAELKKKCQVERMPEYQEIMKMIDTASNQKEKWALEKKRKAFLEENGFSRNAFKADMEKYYKHFNDNIGANVALHGITAQVWIAFDKVFVDNYKQKGKVHFKKPGELCSVQGYSQKKSGGKEIMFREDRIIWNQQGNRDRKKVKREFLLKLSPNNPYEAEMLKRHVKFVCILRKDGKTKPHWYAQLVLEGKPAVKRDPISSAPKHPVGHGVVGIDIGTRTLAYSTDKEVNLLELADRVQNIEQEKRRLQRKMDRSRRAMNPENYNSDGTFKRGVKLTRNKSKRYRRIQHQLAMIQHHQADIRKQQHNELANYLLTLGDCFFVENMSYCDLAHRANKTEISEKTGRYKRKKRFGKSIANKAPAMLITMLKQKCQSRGLEGVKEVDTHVCASQYNHQTDTCIKKALENRWNIMPDGERIQRDLYSAFLLQHCRRDLPEYNRKELQKEFGEELYRVFDREALQRDYPQFVAYHHMTIQRLSELPHTIPSMGIRRIIS

SEQ ID NO: 2507 - protein, 536 aa, unidentified
  REGION 1..536: note = Description of Unknown: uncultivated organism sequence
  REGION 1..536: note = Category: MG81 effectors
  REGION 1..536: note = Description: MG81-790 effector
MNDEKYKKLLKQYHKLSDRHILVVETDMPYPDVLKVIALSDKIRKAGNELVSLMRKNYDQLMRTKKYRKLLKLYGNTKDKDKRKAIANQLNDMQKSYNVTWNFCRTSMIPIGKKYSIDAVFALTKAEDIWRGMEKCLYDNGKTIHLSKYGKLPCIRAKQIDRGIPMFVEDSKLRFKLKKMQFGIQVNDRFQSDEANAVLSYLENSDKMDADAVNTLIEEACCIDTYRPCYATLVPRLIRGKYRVYLHLTIEGKAKPKYDKFGNPRHKYGKGMIGADIGTQTVAYTSDTEVGLKNLSERGNSIQTSERKERLYYRAMDRSRRATNPQNYNPNGTIKKGKKTWKYSNHYKKLKAKHAELCRVNAVNRQLAINEDANYLRSLGDTFVTEPKNASKLMKRAKKTTVNSKGKFNKKKRFGKSIKNRCPSGFQTTVEKKFKITGGTYIEVPNNYRASQYDHTADDYIKKKLSDRLYRLRDETLVQRDWYSSFLLYCYDYRTQNIDKDKCITDFGRCYDKEKALIAWIKANHIKILNSGIKVT

SEQ ID NO: 2508 - protein, 380 aa, unidentified
  REGION 1..380: note = Description of Unknown: uncultivated organism sequence
  REGION 1..380: note = Category: MG81 effectors
  REGION 1..380: note = Description: MG81-791 effector
MRFFCEEKTRAGGKMIQRQLKLKLTPAQQRKCEAWLFRAAGIYNWTIRKMEQDAHGGKYWTAYGLIYEIAGHSKKCDVPAKIIQGTVARAHQAWERCYKKLSKKPRLKSARNKMSGLDIPSDVRRACERITIPGLGKVRYHKDMLPEGKIKACRILKKTSGWYLAVCLEAAPNTIQRTASGRIGIDPGFSSLLTTSDGVKFEHPREMEASAARLARAQRGGHKRTAARIQERIANQRRDRNHKLSRKLVRENELIVFSADRHKAIAKMFGKSVASSAHAQLRSMLAYKSRTGGTRYVEVDSRFSTKTCSACGCLSGPSGFSGLAVREWTCTECGTRQDRDVNAALNTLLSGAGRASKSEIAFCERRESDARMKRASAAQT

SEQ ID NO: 2509 - protein, 511 aa, unidentified
  REGION 1..511: note = Description of Unknown: uncultivated organism sequence
  REGION 1..511: note = Category: MG81 effectors
  REGION 1..511: note = Description: MG81-792 effector
MAKCSTDTCCLTLPLRLEKWQEDRLAKRFEIARQIYNTMVRAELKKLRAMEQSEPYKANQEKIQALDRKTQTDKQALKALYKERDKLLRDGGFSEYGFKSDIKNYYKHFNNNIGSNVAFHGIAPQVWAAFEKMLFKKEGKKVHFKKKGDIHSLRGYSAAGKSGGVEIIFRETYIEWKGLKLPLKLSPDNIYETQMLSYRVKYVRLLRKPGKRKDRWYAQLSLEGKPVIKYNPKTGEVRHPIGKGAVGLDIGPQTLAYSAATGADLVELANQVQNVEQEKRRLQRKLDRSRRATNPGNYADDGTIRRGIALTHNKSKRYLRTQQELKYLQHQQAEIRKRQHTELANHLLSLGDCFYVEKMVWTSLTHRAKETEISEKTGKIKRKKRFGKSVANKAPATLIGILQRKSAALGIPGVIEVPTSVKASQYNHQSGTYTPKPLSQRWNNMPDGERIQRDLYSAFLLQHYNPQTNTFDANSLHQDYPQFVQYHHDAVLRLYAMPKAPSSMGIKRSLR

SEQ ID NO: 2510 - protein, 578 aa, unidentified
  REGION 1..578: note = Description of Unknown: uncultivated organism sequence
  REGION 1..578: note = Category: MG81 effectors
  REGION 1..578: note = Description: MG81-793 effector
MAFGSKNSTPSFVLTLPLDISLNEQDYLYKEFKKCGVIYNQLVSATTKMWHQLRKTRKYRELMAAIAKATPDSDEQKTLFKQREKMLKEYRFSEDAFHKLVVPYAKHFAINSHVAQNVASAVWTAWEGFFFSKGKAVHYKKLEDVASISGKNNATGIVLRPANLTTSNIESAKRKAQKAVEKRYDDMYGRPDPKDDKKVVLPDEVKPQMEAEIAAAIAKIKPTIGEGSLRIVYGKHEFPVVLRNPKTQTGKYQQEALKCGVKYCRITRKWVKTKWKYYAQFILEGYPPTKCDGNGVMKHPVNQGRIGLDIGTQTLAVSGNDICDLMVLAPSARAQAKSLVNEIARTQRAMDRSRRATNPKYYNPDGTIKRLKRKYGQKQKRDWKYSKHHYRLRAKLRDLNRRLADIRKMEHNILANELLQHGNEFVVEDMNYKALQKRSKETKTNAKTGRAHTKKRFGKSLSRCAPAMFISILNKKANRYGGSVIKVSTFETKASQFDHTDESYTKKRLSERMAHLSSGEVVQRDLYSAFLLEYIDTESLEYNTKALNSAFPAFLVMHENTKRRLQAVGSSLPASIGF

SEQ ID NO: 2511 - protein, 369 aa, unidentified
  REGION 1..369: note = Description of Unknown: uncultivated organism sequence
  REGION 1..369: note = Category: MG81 effectors
  REGION 1..369: note = Description: MG81-794 effector
MSASVQNARVPTGTRSGSVIQVQLKLRPNVKLEKRLDEWLWHLTGVYNWAVRKIQLDADDKIYHSPMNFQNLLAGHAKKVGVPGHCIQGVLSTVHAAWQRCFRKQGGRPKLKGQRNKLVSIPFPDPIRCPEGSHVKLPVLGLVRFHKQFLPEGRIKCGRLIKRASGWHLCLFIDAAPKEIERVGFGKIGIDPGFKSLLTFSTGEKVEHPRELEASAKRLAQAQRGKDKKLVARIHERIANQRKDRNHKLSRKLVAENTVIRFSKDNIKGIAKKFGKSVTSSGHGQLRAMLAYKSSHIGGTQYDEPASKNSTRICSNCGCLSGPTGWAGLSVRNWVCQECGSLHDRDQNAAINVLNFGAGTALERGLCQI

SEQ ID NO: 2512 - protein, 368 aa, unidentified
  REGION 1..368: note = Description of Unknown: uncultivated organism sequence
  REGION 1..368: note = Category: MG81 effectors
  REGION 1..368: note = Description: MG81-795 effector
MKTLKLRIRDKHIAKLNHLSGAVNFVWNYVNDLSYKHLKKTGKFFSAYDLNDYTKGSGELVGLHSQTIQAINETHAKSRKQSKKAKLSWRTNNPNAKRKNLGWLPFKQSAIKHIATHQTGKKGLKSTLQLSLAKGQKLIIDLWDSYNLSLYQINTCELVQDSRNRWYACITVKDYPKKSCGGGSVGIDLGLKDSATASNGDKLQIKQTLKYAKDLAIAQRAKNKKRVKAIHAKIKNTRNDLIHKFTSQLVKDNALIVIGDVKTTQFNSKKGKLAKSVYDAGWFELKRQLTYKCENAGCRFEIVSERYTTQICSCCGEISANSPKGRANLGIREWTCAKCGTWHDRDINASKNILAVGLHRLAEGIPSL

SEQ ID NO: 2513 - protein, 371 aa, unidentified
  REGION 1..371: note = Description of Unknown: uncultivated organism sequence
  REGION 1..371: note = Category: MG81 effectors
  REGION 1..371: note = Description: MG81-796 effector
MRIVYHMKSKTQIKTLKVRIKDKHAAILNQWAFEVNQVWNAANELSADYSWVPIPEVGYINCGTSEYDLQKELKTIRAERNFSISAVTIQSVISQHAKSRRQFKKNKLQWRCSSGSKRSLGWVPFKSAGVKFINGQVRFCGKLFSIWDSYDLSKYELGTGSFSQDSRGRWYFNTTIKVEIKSSEGKTSVGIDLGLKTIATCSDGTVFERRRITDEFAKELATAQGAKKKNRVRAIHAKIKNTRSDAIHKFTTTMAENYGAIFIGDVSSKKLTKTKMAKSVLDAGWGMLKTQLKYKAIARSVMFEEINEKYTTQICSCCGVISGNSPKGRAGLGIREWICCECGAIHDRDINAAKNILALGHERLAVGISVL

SEQ ID NO: 2514 - protein, 358 aa, unidentified
  REGION 1..358: note = Description of Unknown: uncultivated organism sequence
  REGION 1..358: note = Category: MG81 effectors
  REGION 1..358: note = Description: MG81-797 effector
MILTFKYRIKDATVGKYLDRHSRSVNFVWNYCCETQRKVEAYYKAGAPKRRWPSHFDLVKLTTGCAAELGLHSDTVGQICKQFVISRNAARHAPRFRASRGPKRALGWLPFIKRTVKLDGAHVVYLKRKFHFWKSRDIPDAIKTGCFTQDARGRWYVCFQCEVADDLPTGNGEVGIDLGLKTLATCSNGDTISALRHYRKYEATLAIAQRAGHKQRVRAIHAKIANVRKDQLHKASSKIAAENQLIVVGNVSAAQLAKTRMAKSVLDASWSMLRNMLEYKASRHRARYVEADERWTSQVCSCCGTIPDSSPKGMGALGIRHWVCSDCGCSHDRDANAARNILRVGAERRPPVEEIPAL

SEQ ID NO: 2515 - protein, 367 aa, unidentified
  REGION 1..367: note = Description of Unknown: uncultivated organism sequence
  REGION 1..367: note = Category: MG81 effectors
  REGION 1..367: note = Description: MG81-798 effector
MIVRELKLKLTSNQVSKLNTQLFYLTGVYNWAVRTIELNAVNKIYYSKFDFVNLLANHSKTLGIPSHTLQGILEQAFIAWQRCFKKLAKKPRLKSVRNKLNSIPFPDAISGTRITDKTIGIPGLGQVRFYKQDLPKGKVKCARAVRRASGWYLQLSIDAQHHFPIKETFDKVGIDTGFKHLAVLSNGTKFENQRNFIKGQKRLAQAQRGSNKKLVARLHERTKNRRKDYNHKISRQIVEAFQEIYITNDNLQSQSKMFGKSVHDAGINQLKQFILYKGDTHGRKCVLVDSKNTTMTCSNCGILSGPTGLIGLVVRNWECSACGAQHDRDINAAKVILNTGLGWSLENTETHAVKPEIFRLESSGGAR

SEQ ID NO: 2516 - protein, 536 aa, unidentified
  REGION 1..536: note = Description of Unknown: uncultivated organism sequence
  REGION 1..536: note = Category: MG81 effectors
  REGION 1..536: note = Description: MG81-799 effector
MIDEEYSKILKQYHKLSDRHILAAKTDMPYSDVLKVVALSDKIRKAGNELVGLMRKNYDQLLRTKRYRKLLSLYGGTEDKAKRKNYANQLNEMQKSYNVTWDYCRTSMIPIGKKYGIDAVFALTKAEDVWCGIEKCLYGNGNIIHFSKYGELPCIRAKQINRGIPMSVKDDKLQFKLSKTSFGIQINDRFQQDEVNVILSYLAEPEIMDNKAVNTLIEDACCIDTYRPCYATLVPKMIRGKYRVYLHLTIEGKAKPKYDKHGNLRHKYGKGMIGADVGTQTVAYTSDTEVGLKNLSERGRSIQYSERKERLLFRAMDRSRRATNPQNYNDDGTIKKGHKVWKRSNHYKKLKARYSELCRINAVNRQLAINEDANHLRSLGDTFITEPKNAGRLMKRAKEATKNDKDRFNKKKRFGKSIKNRCPSGFQTTVEKKFKVTGGTYIEVPSNYRASQYDHTADDYIKKKLSDRLYKLRDGTEVQRDWYSSFLLYCYDYRTKDIDKDKCITKFNGCYNKEKALITWIKAHKIKVLNSGIKIA

SEQ ID NO: 2517 - protein, 367 aa, unidentified
  REGION 1..367: note = Description of Unknown: uncultivated organism sequence
  REGION 1..367: note = Category: MG81 effectors
  REGION 1..367: note = Description: MG81-800 effector
MYQVLKLRIYRKHYVKLDKLSSAVNFVWNYVNNLCWQMWRRKRIFPSAYDIHEYTKGAGEELGLHSQTIQFIGEKHYQSRKQHKKVKLAWRTNRPDAKRKSLGWIPFKASAISHVKTYNTGKKALKSQVQLSCGKEKLILTVYDQYDLRRYNGFRTAEIVQDSCDDWYLCLLVKVEPKVCTATGEVGIDYGCKTAATCSNGDKLETKLTKQYAEKLATAQRAHKKNQAKRINRKIKNKRADATHKFTSKLVKENRLIVAGNVKSSSFTSGKLAKSVYDANWFAINRQLEYKSRRAGCQFIVVDEKFSTQTCANCLQITNSSPKGVTGLGIREWICDCCGQLNDRDVNAARNILRFGRETLAEGSPVF

SEQ ID NO: 2518 - protein, 495 aa, unidentified
  REGION 1..495: note = Description of Unknown: uncultivated organism sequence
  REGION 1..495: note = Category: MG81 effectors
  REGION 1..495: note = Description: MG81-801 effector
MSHLRPSRSRNGSPRGIEAGGVIAHNRIEARRQPQQPLQIANFSDLAGVPERAGMMPSPTVTNSRMDETETTDPMDVCNAVDSAALACEGDSTGTWVTRTLRLKVKKNSYAWLNAAAAEVNQVWNWAAEISTKAARPCTGNAKWLTGFDLDKLSSGASKYFHKIGADTIQRVNGEYALKRKAAGRLRLRWRASAGSRRALGWVPFKAESLKRKGRAVRFCGKQIRVFEWKRLEGVKWKQGCFAQDAVGDWWLCLPHALRIEESVAPLEKVGVDLGLKDVAATSDGMRCEKGLFFRGIEKKIAQAQRRGHKRQAKRLHRTASNRRRAALHRFSRRIVENYQKIVVGDVSSTQLVKTRMAKSVLDSGWAMLKTMLQSKGQQAGRIVQIASERYTSSSCSSCGSLSGPHGVNGLRVSHHGTTGSRLRSAVDYAVGRERTVAQSHIRMGAGDEEITIYRFGCPCRNDCSGDSGTRGRSAQPGHDPQSAGVGPPAHRQAG

SEQ ID NO: 2519 - protein, 363 aa, unidentified
  REGION 1..363: note = Description of Unknown: uncultivated organism sequence
  REGION 1..363: note = Category: MG81 effectors
  REGION 1..363: note = Description: MG81-802 effector
MLQVQLKLRPCKAQEQIYDQWLYNLASVYNFAVRKIELNAKDKIYFSKNDFQNLLANHGEKLGIPSHTIQGVLCTVHDAWKRCFKKTAGKPKLKGMRNKMSSIPFPDPIKAPKGNRITLPGLGSVRFHKQEISEGKIKCGRLIKRASGWYLCLFIDAEPNPIKRLAFGAIGIDPGFSNLLTTSDGEVIEHPRELEAAAERLGQAQRGHNKQLAARIQERIANRKKDRNHKLTTKLVSENVLIVWSKDAIKGIAKRFGKSVNSSSHAQIRQMLSYKMPKSGGTFIEVASKYSTKTCNECGNPTGPTGLAGLSVRQWECNVCGAQHDRERRYQHPCCCGRMCRRGLRLCVAVQESQTSSLGASKH

SEQ ID NO: 2520 - protein, 503 aa, unidentified
  REGION 1..503: note = Description of Unknown: uncultivated organism sequence
  REGION 1..503: note = Category: MG81 effectors
  REGION 1..503: note = Description: MG81-803 effector
MAKCKTATCSLTLPLRVEKWQIDKLDKRFEIARKIYNIFVGFELKKLNRLKQTPEYREILHEIKLKNQDKEKNKAEIKALYNKRNAILKQWNFTELRFTNDMTTMNKYYSSNFGAITSQSISNDAWRAFNTLLFGKGEQIKFKKIGAVNSVSGKSFNREIRLIPSKNCIEWKGLTLPYRVERGNLYEEKMLSHKVKYVRILRKWANTKYNYYAQIVLEGVPEPKINKKTGELLHPIGEGRVGLDIGPQTIAYVSDTEVGLTELADKVVSIEKEKRRLSRKLDRSKRATNPTNYNQDGITKHGVKLTHNKSKRYLITQEELKTLYRKQADIRKLQHNILTNKLLSLGSEFYVEKMSIIGLARRAKKTEISEKTGKFKRKRRYGKSITNKAPAMLLQILNNKLKAQSLSKLIEIDTYNAKASQFDHINETYTKKSLSQRWTKLDNGDEIQRDLYSAFLIQNTDNTLKAFDKVLLNEKYSNFKIMHDAFINQLKEQSTYHPTSMGV

SEQ ID NO: 2521 - protein, 348 aa, unidentified
  REGION 1..348: note = Description of Unknown: uncultivated organism sequence
  REGION 1..348: note = Category: MG81 effectors
  REGION 1..348: note = Description: MG81-804 effector
MQLTYRFRLRDKHCSELNRQSRAVNFVWNYCNETQRNAARSSKKWLSGYDLMKLTAGTSGDLGLHGHTIQKTCAQYDKSRRQHKKPWLRFRGKKSLGWVPFNTGQVAFDGASFAFRGVRYEPMHLRDLAPGVKIGIGSFSADSRGRWYINVLVEVPGAAVVPASAVGIDLGLKSLAVLSNGEAIESPRFYRNHEAALATLQKAHKAKRTTAIHAKVANRRKDFLHKASATIARENGLIVVGDVSPSKIAKSRFAKSSLDASWADFKRMLSYKAIRHGGTFLEVDEAYSSQTCSTCGSRPESRPKGIAGLGIREWTCSDCGAVHDRDVNAALNILRAGQRTLAGGAHAA

SEQ ID NO: 2522 - protein, 364 aa, unidentified
  REGION 1..364: note = Description of Unknown: uncultivated organism sequence
  REGION 1..364: note = Category: MG81 effectors
  REGION 1..364: note = Description: MG81-805 effector
MKTQTKTLKVRIKDKHADVLNRMAFECNQVWNAANETSAEFSWVPVPEVGYMNMQTSGFDLMKELKGIRNDRDMIIGAGTVQEVIAVHAKARKQFKKNKLRWRSSGGARRALGWVPFKSGAAVWVNGQIRFCGIHFKCWDSYGLSQYNFRSGSFSQDARGRWYFNIVVQVEVEERIAGNGQIGIDLGLKTTATCSNGDTLERQNCYRNSEAKLGKAQRANKKKQIQTIHAKIKNRRADAIHKFSNKLVKENSLIVVGNVSASGLAKTKMAKSVLDAGWAMLKIQLDYKSKGMQGVFIEVNEAYSTQACSCCGTISANSPKGRAGLGIREWSCPDCGTTHDRDINAAKNILRLGHQSLAVGIPVL

SEQ ID NO: 2523 - protein, 514 aa, unidentified
  REGION 1..514: note = Description of Unknown: uncultivated organism sequence
  REGION 1..514: note = Category: MG81 effectors
  REGION 1..514: note = Description: MG81-806 effector
MGNSSTDTCCLTLPLKLEKWQEDRLAKRFELARQIYNTLVRAELKKLERVKHSAPYREIQGQIQALDWSNPNDKGALRRLYKARDALLKSSGFTEYSFKSDIKYYYKHFSDNIGSDVAFHGIAPQVWTAFEKVLFKGGKKIHYKQYGDVSSVQGYSKTRKSGGREIMFRGTYIEWKGLKLPLKLSPDNAYENEMLRYRVKYVRLVRKPGKQKDRWYAQLALEGKPVVKREPVTGEAVHPVGSGVVGLDIGPQTLAYSAPGEAGLVELAAQVQNIEQAKCRLQRKLDRSRRATNPDNYSEDGTIRRGVKLTRNKSKRYRKIQNQLKYLQYCQAETRKRQHTQLANHLLSLGDSFYVEDMPWPALARRAKETVVSEKTGRIKRKKRFGKSIANKAPATLTHILKQKCTSLGLPGVVEMPTSVRTSQYNHQTGEYIKKPLSQRWNNMPDGQRIQRDLYSAFLLQHYDPGTGTFDSASLQRDYPQFTQYHHQVIQHLLSMPKTPSSMGIRQSVRQYEF

SEQ ID NO: 2524 - protein, 348 aa, unidentified
  REGION 1..348: note = Description of Unknown: uncultivated organism sequence
  REGION 1..348: note = Category: MG81 effectors
  REGION 1..348: note = Description: MG81-807 effector
MIYRHLKLKLTKVQEESVHRWIPSLTSIWNWAICKIENDSKGGIYYSQKEFQNILCGTSKVLNIPSHTVQGVLISAHMAWQMCYKKAAKKPRFKGNRNRLNSIPFPDPFRVPKDNRITVPGLGRVRYHKQDIPEGKIKCGRVVKRASGWYLCLFIDAEPAKISGTGEGAVGIDPGYKHLLTLSTGEKVAHPKELQHSIKRIGQAQRGGNKRLVARLNERIANQRKDRNHKLSHRLVAENAVIAFSKDNIKGLSRAGFGKSVAAAGHGQFRLMLAYKSRAGGRQYIEVPSKGSTRTCSTCGASTGPQGRAGLSVRQWTCSACGTPHDRDVNAAINTLNAALGMSVERAI

SEQ ID NO: 2525 - protein, 387 aa, unidentified
  REGION 1..387: note = Description of Unknown: uncultivated organism sequence
  REGION 1..387: note = Category: MG81 effectors
  REGION 1..387: note = Description: MG81-808 effector
MKTLKLRIKDKHATQLNRLSSSVNFVWNYVNDLGYKYLQRTGKFLSAYDLNDYTKGSGELLGLYSQTIQAINETHAKSRKQFKKAKLNWRTNNPNSKRKSLGWIPFKQSAIKHIATHQTGKKGLKSTLQLSLDKGKKLVIDLWDSYNLSLYQINTCELVQDSRNRWYACITVKNYLKQTCGTGSVGIDLGLKDSATTSNGDKLQIKQTLKYAKDLAIAQRAKNKQRVKAIHAKIKNTRLDLIHKFTTGLIKQNALIVVGDVKSNQFNSKKGKLAKSVYDAGWFELKRQLDYKCKYAGCQLEMVNESYTTQTCSCCRQIDSNSPKGRTGLRIREWTCAKCSTWHDRDINAGKNILAVGLDRLGAGIPERQGGEEVKGHAHPSHLYECE

SEQ ID NO: 2526 - protein, 1330 aa, unidentified
  REGION 1..1330: note = Description of Unknown: uncultivated organism sequence
  REGION 1..1330: note = Category: MG81 effectors
  REGION 1..1330: note = Description: MG81-809 effector
MKREKNITIMKISKVNHRRTAVALNGDKSELGGILYEAPVQKDKNGNYNDVIAETGKVVNEALDKKSRLYTPFNNQKVIIDKNLQRYANNLKRCYINFVKQYVNNKSFNYKAMQFIPDIQNPKTNDAVNYRTDRDNVYNKNKYYDKQTKSKSKKFIYEKIVIPQNEQNIVISALVNCSLRKSLRKDVSYKTKSGEIKTYNLPELVKKSMRFYCLEGQREPDEKEKYEMYILFSYMKEDKRTKNTDLLVKSISNQNTKVKVEDIDGNKLLKLSIADTKKKPLWEYLIKYADSSRQRELMYDIRKKIILYVAGIEEYENIKEDSGLSKVSWSKYNISDNKMFFDINSCTDKRKQNLEIKIREANIEHYRNASSKLCDDESIFWFQHFEGVIETLFSKKSKISEERLGCAYICDYLWKDFLSYLAAKYIDLGKGVYHFTMKDKLDMLNKNEAITDLRFGIVSEKYEKGITSFDYERIKAEEELDRNIAAYVTFAADIFAKSVIKSDYRTKKDNNSDVLQYSDKEFRNSEVIRDNAEKNILQYWGGYSRWGTENSKLPENNKVSDFDKLDVSDLCIDIKKHLAGIRNSSVHYTTKIKNESAADGSNVKILFEKDLADINIIYADKYYSNNVWMFYSLEDINKLIAFLYKEKRVIRQVQIPSFSRILKRKAMQDVINEIFKDDFDENIVNPELKEKYRNSLYFMLKEIYYNAFIIQPELKEKFKDKIKTMKSELYNKLKTIDKKEYKALYCMLSNEESALKNFADRIYSVDGDNVSFADICKILMTDYNMQNQEKKNIESMEQKKKNKGKDENYKHFPLLLHKVLKELFIEYLKQTHELEFLRNNICIKSDVTMESFESQIKGVEIYKDLKEKIDKNNSLLDWYVIAHFLMPKQLNHLIGNIKNYIQFATNIDKRAESVKNLTESGMVKRIQYYDDIVRTLEFSAQYIGKISNNINDYFNSEDEYVSFLSKYVGFINDKSEDVLTELKDFCREKINNGSQIIGIYYGGDNVIINRNVIYAQMYSNAEVFSNIYKKVTKNDIINYYEKQNDLKDVFKSGVCQNEDEQRSLCEFQQLKNRIELTELSTYADMVNDFMAQFVEWAYLRERDLMYFQLGIHYIRLFYSDNVLDEKYHKLSDNVIDIEEGALLYQIVAMYDYELRIFETDNSGNAKRIGQGGPGKSIPVFLKKYCNGTDVYECGLELFEDINQHEHIIRFRNDIAHMRYMSNQAMNIMSIVSNIYKSFFAYDTKLKKSISLVFKNILMRYGVIADLVFSYNNKNQSIKDDMDINIINIKNLKSDKYVYKIVNEDIVKQVEIEIRNQVFLEQLHNLLYFSR

SEQ ID NO: 2527 - protein, 370 aa, unidentified
  REGION 1..370: note = Description of Unknown: uncultivated organism sequence
  REGION 1..370: note = Category: MG81 effectors
  REGION 1..370: note = Description: MG81-810 effector
MYITYRYRVKSLEGLLRKQAQAVNYVWNYCNETQKSYLRLGKKWLNHFDLTKLTTGVSKELGINSDTIGAICKKYVLSRRQHKRPFLRWRTKKSLGWIPLRGRHLEQTPNGFKYGGKIFKVFLSRPIPPVAKICDGSSFSEDARGRWYINLLLKLPDETVRPVQTAVGIDLGLKDLAVLSNGEKVETPKFFRGLEEKLGKAQRAKKKRLEKSIHAKISNSRKDFLHKLSTRIVKRFDWIAVGNVSSSKLAKTRMAKSVLDAGWSSFRSFLAYKALACGATFMEVNESFSTQVCSSCGCIPPESPKGIADLGIRNWTCGDCGAVHDRDVNSANNILFGSGCRTPVEGTLIENMKETSNPDLSKCEKVFTFK

SEQ ID NO: 2528 - protein, 578 aa, unidentified
  REGION 1..578: note = Description of Unknown: uncultivated organism sequence
  REGION 1..578: note = Category: MG81 effectors
  REGION 1..578: note = Description: MG81-811 effector
MAFGSKNSTPSFVLTLPMVIGLNEQDYLNKEFKKCGIIYNQLVNATTKMWHQLRKTRKYRELMAAIAKAAPDSDEQKALFKQREKMLKEYRFSEDAFHAMVVPYAKHYAINSHVAQSIATAVWTAWSSFFFDKGKGVHYKKLEYVSSISGKNNATGIMLRPANHTTSVINSAKTKAKNSIEKKYFAAYRKPDAKEGEEVVLPDEVKAQMEKEIAAATAKVKTSIGKGKLHITYGDYTFPVTLRNPDTQTGWYQQEALKCGVKYCRIIRKWVSTKWKYYAQIVLEGYPPIKCDNNGVAKHPVKQGRVGIDIGTQTIAFSGKDVCDLRVLAPAARAQAKSLVNEIASTLRAMDRSRRATNPKYYNPDGTIKRLKRQHGQKQKRKWKYSKRYYRLRAKLRNLYRKLADIRKMEHNILANELLANGNEFVVEDMNYKALQKRSKETKINPKTGRAYTKKRFGKSLSRCAPAMFISILGKKANRYGGSVIKVSTFETKASQFDHTDESYTKKKLSERMARLRSGDIVQRDLYSAFLLEHIDTESLQYNMETLNSAFPAFLEMHENTKRRLQTVGSSLPASIGF

SEQ ID NO: 2529 - protein, 383 aa, unidentified
  REGION 1..383: note = Description of Unknown: uncultivated organism sequence
  REGION 1..383: note = Category: MG81 effectors
  REGION 1..383: note = Description: MG81-812 effector
MPLSFTRTLRLKVRREAYAWLNAAAVEVNEVFNYCNETSLKAATRTDNKRKWMSGFDLCYLTAGATQYFDRIGAGTIQSICIHYAQKRQAARRVKLRWRVSRGARRSLGWVPFKAASLKRKGVCLRFAGKCLRVFERERLEGVRWQAGCFAQDAVGDWWLCLPVKVEAEETIAPQEAVGIDLGLKEIAVTSGGERLEAGRWTQGYAQKLASAQRRGHKRQAKRIHRKAARCRADALHKFSRRIVDRYQNIIVGDVSSLKLVKTRMAKSVLDSGWGMLKNFLDYKSQQAARSFKVVSERNTSVTCSACGALTGPRGVNGLIVRLWICSDCGESHDRDVNAARNILIGSRCRTSVSGNESSPWLIPPSSAYRVREAGIETARAAA

SEQ ID NO: 2530 - protein, 347 aa, unidentified
  REGION 1..347: note = Description of Unknown: uncultivated organism sequence
  REGION 1..347: note = Category: MG81 effectors
  REGION 1..347: note = Description: MG81-813 effector
MIQYQLKLRMCKSQEQQCEQFLYHLSSVWNWAVRKIELNAKDHIYFSKMEFQNFLANHSERIGIPSHTLQGVICTAHDAWKRCFKKIGGKPRLKGMRNKMSSIPFPDPIKAPKGNRIILPALGSVRFHKMDLPTGKIKCGRVVKRSSGWHLCLFIDAEPKAIERMGYGVIGIDGGFKDLLTLSTGEKIEHPRELEAAAERLAQAQRGHDTKLAARIQERIANQRKDRNHKLSHRLVAENVVIKFSADNHKAVARRFGKSVASSGHSQLQRMLSYKSPQSGTEYFEIAPKDSTKTCWVCGEPTGPTGLAGLSVRQWRCTTCGTFHDRDQNAAVNTLIAAAGCAVEVCI

SEQ ID NO: 2531 - protein, 352 aa, unidentified
  REGION 1..352: note = Description of Unknown: uncultivated organism sequence
  REGION 1..352: note = Category: MG81 effectors
  REGION 1..352: note = Description: MG81-814 effector
MTQTKTLKVRIRDKHAPMLRHMARSVNFVWNYLNELSQRSIRERGVFLSAYDMQKYTNGCAKELGLHSHTVQVVGKEYATRRLQFRKSRLNWRKSRGVRRSLGWIPLNTGAASWKNGQVYHNGNFFKVWDSFGLGHYRFRSGSFTEDARGRWYFNVVVDVEAKPSAGKHAVGIDLGLKTVATCSDGAALENARFYRDLEPALAIAQRAGKKARVRTIHAKIANRRKDALHKFSRSLVERCNLIVVGDVSPQKLAKTNMAKSVLDAGWGQLKTMLAYKCAHAGIVFREVSEAYTTQTCSCCGAMPGERPRGIAGLGIREWTWECGVTHDRDINAARNILAAGHRRLAVGIPAL

SEQ ID NO: 2532 - protein, 1668 aa, unidentified
  REGION 1..1668: note = Description of Unknown: uncultivated organism sequence
  REGION 1..1668: note = Category: MG81 effectors
  REGION 1..1668: note = Description: MG81-815 effector
MDLHSDGDGERDHGIISPVKEKVEETLPEFICKGTYKGVPLCDDNKNRIRGRKGKYHLFVLLKSDAGKKHLLAENANMLVKDDWAANRYFHMASSVVNRLIFHNPLYSGGQMPAIKLDIATRATGDIDKMGNGIKEEFQKQKYRVKKGNNREYYSIMNADIYRTLIAQEMVNSGKINIRIEKLNIKSICYDSSGQGMEFLYLADSICSILGYRLTKTGSSADDWLVQIKERICDLNRDNENLIFGYDEIDNYFSNAWGQFENKDMFKALSVIYDAKWMKGEFAKHYQNEWFPFLEEQLRRRATPELFLQSVDQLHAFLQTNNIDQEKLLYIMQQLESMVEGVSNRFKSKESKERALYKLYDAGVAVYCHIGDATKAQGYYEKCRLHVVYVSLDDYMKTNNRLIVLLEDAFQWDEALNKAKENLDILQMIAKGATVSPKNFLDCLQKSAETIKFERRKKKSGNVVWVPVKLEEDYKKYGTSLQEQVEQAVHFNIKRSLSKETVIHSVCKILISFFQKNQITLKEEESRLLIQALDKDIRKEKQLKYIEKSIQLQNTKVQPVQVDGKTVLALSGAKHPKKKIIFDFLVRYANASQSDQENMLIQMRKWILLFVCGEQAYKEAEEKGISTRGFAAEHGDIPGTFGGDVYSKISDLQEIKKQDKGASERLKVSKLKKEIAAMINDTLTTVYREIKGMDGVAEEDMFWIEYIQKEVQKVLLKKNKLATGIEYKIQNKYLCNQVWKNWVSFIAGKYVDMGKGVYHFVMPECNSNINELEVCEVQDFYKKGISSFDYEMIKAEETLERDMAVAVTFAVNNFSRAIIKKESERTTSQNEDVLQYTEKEFEKYCDGENIHKNILQYFGGISKWEDCEIVHASGFEVFDTIKKNINCVRNASYHYSQNLEKREVRNKYVDMLCRHEVDNYTEIIKDKYYSNNLYRFYPESTLKRLMDELYSEVKERPAQIPAFNRIINKQKIAAFLSTVIKGNKLKKVIGNVEDASLFYPAMIFLLKEIYYNAFICNENCKKWVEEAALKNAENEKDKNKKEANKNFILRLEQLHTESFGDMCQQLMTALDLQNNRDHRVNTNADQLKYKHFRILLYNAIYEAFANFIKSKEQKLYSLYDAVREPVLQTNLKTREEFLSGWTAHRYDTKIDKITGNSILSAWYVTSHFLAPRQVNHLAGSMKNYRQFVNDIGDRRNKVESKQSYRKTEIYEDVVMVLELVDASSGQISNEVKDYFGSDEEYARHLSKYVDFSDEKAKNNMEEPSCRMLLQLFSENRQQTGDGDMIDIYYKNNVILNRNIVLSKMYGLDICENGWWQKVTLENDILNYYKLKRELSSGSKFTGTAVFEKGRCEFPEEQEKLKKFQNIKNRVELLDVMTYEEILIDLYSQLVSWAYMRERDLLYMQLGVAYLALNYGDKSYRTRSREMFGDDRLNSMEGPGPVNIKNGALLYQLIAMNNPCMTLYEVENGKATPAKKAGNSIGARVGCLYKGYLNCREEVYKNGLYFFENYQLHDYIVKHVRNEIDHFKYFRKPVKSLLELYSEIYTYFFTYDKKLQKSVTFILLNILEKYFVRAKIQMGYKKVEVKNDKKEMIPVIETDINIEKAHSLYMFYNQIKYREQDSKEDKKAYNDYKSRYDLDIGKGVLKLEARDDLFVKQLLELLSYKESMR

SEQ ID NO: 2533 - protein, 353 aa, unidentified
  REGION 1..353: note = Description of Unknown: uncultivated organism sequence
  REGION 1..353: note = Category: MG81 effectors
  REGION 1..353: note = Description: MG81-817 effector
MIQCQVKLKLTPRQGRQLDHWLRHLTSVWNWAIKKIENDGRDGIYYRSKEFQNLLAGHSRKLSIPSHVLQGVLSQAHGAWARCFKRITRRPRLKGRRNKFNSIPFPDPIRPPTGNSLTLFGIRRVRFHKQTIPSGVIKCGRIVKRASGWYLCLFIDAEPNAISPISNGEIGIDPGFSSLLILSTGEKIEHPRELEATEQRLAQAQRGNNKQLVSRLQERISNQRKDRNHKLSHRLVAENQVVAFSKDRHSAIAKRFGKSVASSGHYQLRQMLSYKSKCRTDGLGVYVEVDSRNSTKTCSACGCLSGPTGLAGLKVRQWTCADCGAQHDRDVNAAINTLIAGAGLAHEMSVRAA

SEQ ID NO: 2534 - protein, 352 aa, unidentified
  REGION 1..352: note = Description of Unknown: uncultivated organism sequence
  REGION 1..352: note = Category: MG81 effectors
  REGION 1..352: note = Description: MG81-818 effector
MIQIQLKLRPTPRQERRLGHWLRHLGSVWNWAIKKIEHDSRDCIYYSSLDFRNLLNSHGPKMDVAQDAICGTLWSAHTSWRRCFKKVSRKPRLKGRRNRFNSIPFAHGVKVIDGRLSVVRLGRIRFHKQEIPEGQISQFRLVKRASGWYACLFIKADGDAIFATADGCVGIDPGFSSLLTLSDGEVVEHPRELEASAKRLSQSQRGRNRKFTSRLQERIANQRKDRNHKLSRRLIAENQLIAFSADRHKSIAKRFGKSVASSGHAQLRQMLSYKSKRRTDGLGVYVEVDSRNSTKTCSACGCLSGPTGLAGLKVREWECAQCGTEHDRDINAAINTLIVGLGGSHERQAIAI

SEQ ID NO: 2535 - protein, 352 aa, unidentified
  REGION 1..352: note = Description of Unknown: uncultivated organism sequence
  REGION 1..352: note = Category: MG81 effectors
  REGION 1..352: note = Description: MG81-819 effector
MKTLKLRIKDKHCKVLDQLASEVNFVWNYVNDLCFKHLQRKQQFFSAYDIAKYTKGTSKECNLHSQTIQAVAEELVTRRKQFKKAKLKWRVSNKKNARRSLGWIPFKKVAVKYADGYVQYGKHQFKLWDSYGLSKYNVKTGSFVEDSRGRWYVCLVVDSIKTEKTTAKTSIGIDLGLKDLATCSDGVKFKAPKIYRQYEQKLGIAQRARNKKRVKAIHAKIKNLRQNMLHQFSHKLVNEHAAIFVGNVNAKALAQTKLAKSVLDAGWTTLRTMLKYKCENAGVWYEEVNEAYTTQTCSCCGSRSSSLKGRAGLGIREWQCVECGTFHDRDINSALNILALGHGRLAGGISVL

SEQ ID NO: 2536 - protein, 491 aa, unidentified
  REGION 1..491: note = Description of Unknown: uncultivated organism sequence
  REGION 1..491: note = Category: MG81 effectors
  REGION 1..491: note = Description: MG81-820 effector
MKKSNTDTCCLTLPLKLEKWQEDRLAKRFEIARQIYNTMVHAELKKLRNIENSQPYRQIQKQIEALNWKNQNDKARLKSLYNDRNKLLNTIGFSEYGFKADIKYYYKHFNDNIGSSVAVHGIAPQVWAAFEKMLFHKEGKKVHYKKKDDIHSLHGYSVTGKSGGVEIIFRKTYIEWKGLKLPLKRSPDNAYETEMLGRRVKYVRLLRKPGKRKDCWYAQLSLEGKPAIKRDPESGERRHSIGRGAVGLDIGPQTLAYSACGAADLVELADQVQNIEQMKRRLQRKLDRSRRATNPDNYADNGTIRRGVKLTHNKSNRYRRTQRELRYLQHCQAEIRKRQHIELANHLLALGDCFYVEDMAWPSLTHRAKETAISEKTGRIKRKKRFGKSVANKAPATLIGILEQKCNSLGLPGVVKVPTSLRASQYNHQSGEYTSKPLSQRWNNMPDGERIQRDLYSAFLLQHYDPKAGSFDSALLQQDYPQFVQYHHRAI

SEQ ID NO: 2537 - protein, 367 aa, unidentified
  REGION 1..367: note = Description of Unknown: uncultivated organism sequence
  REGION 1..367: note = Category: MG81 effectors
  REGION 1..367: note = Description: MG81-821 effector
MKTLKLRIKDKHANQLNKLAGSVNYAWNYVNDVSYKHLQKTGKFFSAYDLNEYTKGSGEYLGLHSQTLQAINETHAKSRKQFKKAKLNWRTNRPDAKRKSLGWIPFKKSAIKYLSTRQTGKKALKSTIQLSLSKGQKLIIDVFDSYNLSLYQINTLEIVQDSRNRWYACITVKDFPRQVSGKGSVGIDLGLKESATTSMGDVLTTKQTQKWAKKLAVAQRANNKKWVKAIHAKIKNSRLDLIHKFTTQLIKDNALIVVGYVKSRSFTGKKTKLAKSTYDAGWYELKRQLKYKCENAGCRFEIVNEKYTTQTCSCCGDMSSSPKGRAGLRIRGWTCAECGTWHDRDINAAKNILAVGLDRLAGGIATQ

SEQ ID NO: 2538 - protein, 352 aa, unidentified
  REGION 1..352: note = Description of Unknown: uncultivated organism sequence
  REGION 1..352: note = Category: MG81 effectors
  REGION 1..352: note = Description: MG81-822 effector
MIQCQLKLKLTARQERQLGHWLRHLTSVWNWAVKKIENDARNGIYYSRLTFRNLLNGHGRKIDVPQDALCGTLDTAYTAWRRCFKKQTRRPRLKGRRNRLNSIAFGHGTRVINGRVVIPRMGRVRFYKQAIPMGHIGQFRLVKRASGWYACLFIQADREAVPVVASGTVGIDPGFSSLLTLSTGEKVEHPRELEASTLRLAQAQRGSNKKLAARIQERISNQRKDRNHKLSRRLVAENQLIAFSADRHKSIAKRFGKSVASSGHAQLRQMLSYKSKCRTDGLGVYVEVDSRNSTKTCSACGCLSGPTGLAGLKVRQWVCVACGAEHDRDINAAVNTLIAGAGAVHEGQVIAA

SEQ ID NO: 2539 - protein, 344 aa, unidentified
  REGION 1..344: note = Description of Unknown: uncultivated organism sequence
  REGION 1..344: note = Category: MG81 effectors
  REGION 1..344: note = Description: MG81-823 effector
MARAVNYVWNYCNDIQKKAARSNRRWVNWVMLNNLTSGCSKELRLHSQTIQAIGECYATSLKEAKSPTGKKKRFLRFRGRRSQGWIPFKASGIKLRGDSAVYQGRRFKFWKTRDIPPTIKNGNFSCDSRGRWYLNLVCEYEETIVSNEGNVGIDLGLKSLATLSTGKKYDAQKFFRKYERKLAHHQRCNNSRQVQTIHAKIANSRKDFNHKVSHELTRDFNKIFVGDVGSLGLLKTKLAKSVSDASWGQLRTFIEYKAIARGGTYYVVDENNTTRTCSACGCLTGPSGLAGLRVREWQCKECGTVHDRDTNSAINIEQRGLLTLPSPLRTLSAKDSESLGIPRL

SEQ ID NO: 2540 - protein, 351 aa, unidentified
  REGION 1..351: note = Description of Unknown: uncultivated organism sequence
  REGION 1..351: note = Category: MG81 effectors
  REGION 1..351: note = Description: MG81-824 effector
MIQTQLKLRLSATKEAQLNDWLWSLTGIHNFAVRKIELDAKDGIFYPRMGFQNILAGHGGKIGIPSHVVQGMLAQVHTAWSRCFKKIGGKPKLKSARNKLNSIPFPDPIRSPNGNHIKLPGIGLICFHKQEIPVGDIKCGRIVKRASGWYLCLFIDAERKPIKRIACGRIGIDPGFKDLITTSDGEKVPHPKELQNKIARIGKAQRGVNRKLVARLHERVSNQRKDRNHKLSLRLVQENTLIVFSKDNIKGIAKKFGKSVSSSGHAQLRSMLNYKSRAGGSQYTEVNPRNSTRTCSSCGALTGPHGLAGLSVRQWECGCGVRHDRDVNAAVNTLLSGLECAANQGGLRDVA

SEQ ID NO: 2541 - protein, 348 aa, unidentified
  REGION 1..348: note = Description of Unknown: uncultivated organism sequence
  REGION 1..348: note = Category: MG81 effectors
  REGION 1..348: note = Description: MG81-826 effector
MQITLKLRLRDRHAAKLARHARAVNYVWNYCNERQRQAVRECRRWLSYPALAALTAGTSVDLDLHAHTIQRVCLAYAAARRAHKKPWLRWRGRRSLGWVPFNTGHVSFDGEAFTFRGVRYETMHLREIPTGAVIGAGSFNADARGRWYINLPVEVLEATSASITHVGIDLGLKDFATLSTGEKIAAPRFYRASETKLATAQRARKTRHARAIHRKIAARRRDFLHKTSVQLVKRFGLIFVGDINPSQLVRTTMAKSVLDAGWSNFRAMLRYKSRLRGGGVCLEVSEHLSTQTCSECGRLPASRPRGIAGLRERVWRCDDCGTVHDRDVNAARNILRLGQQTLGGGAHV

SEQ ID NO: 2542 - protein, 384 aa, unidentified
  REGION 1..384: note = Description of Unknown: uncultivated organism sequence
  REGION 1..384: note = Category: MG81 effectors
  REGION 1..384: note = Description: MG81-827 effector
MTGVFGTIFATSNFMARPSKSANRQAALGVTTRVLRLRIKDKHARVLSAMAREVNQVWNYCNETSHRAIRERSQWLSGYDLQKLTNGFSKCEGVQIGSPTVQQVCEDYAKARKQFKRAKLRWRVSNPKSSKYSLGWIPFKARALQYKAGQIAFAGQRLHLWDSYGLGDYELRAGSFSEDSRGRWYLNVVVKVSTKASTATASVGIDLGLKEAAVASDAQRIEGRFYRKLEARLGIAQRAGKKCRVKAIHAKIKNQRKDMLHKFSAAMVKDYGAIFVGDVASAKLVKTKMAKSTLDAGWASLKTMLEYKSHQAGVVFEVVSESYTTQTCSCCGSIPASSPKGRTGLRIREWVCSGCGAVHDRDVNAARNILAAGHRRLAEGISGV

SEQ ID NO: 2543 - protein, 536 aa, unidentified
  REGION 1..536: note = Description of Unknown: uncultivated organism sequence
  REGION 1..536: note = Category: MG81 effectors
  REGION 1..536: note = Description: MG81-828 effector
MIDGEYKKILKQYHKLSGRHILVAETDMPYSDVLKIVILSDKIRKAGNELVGLMRKNYDQLFRTKRYRKLLFLYGNTGDKVKRKILANQLNEMQKSYNVTWDYCRKSMIPIGKKYGVDAVFALTKAEDVWHGVEKCLYGNGRTIHFSKYGELPCIRAKQINRGIPISVKDNRLQFKLGKTTFGIQADDRFQTDEVNAVLAYLAEPEIMDKKAVNTLIEDAYCVDTYRPCYATLVPKMIRGKYRVYLHLTIEGKAKPKYDKYGNLRHKYGKGMIGADIGTQTIAYTSNIEVGLKNLSERGNSIQTSERKERLLYRAMDRSRKATNPQNYNDDGTVKKGHKTWKYSNHYKKLRARHSELCRINAVNRNLAIKEDVNHLRSLGDVFVTEPKNASKLMKRAIKTTKNYKGRFNRKKRFGKSIKNRCPGGFQSNVEKKFKATGGTYIEVPNNYRASQYDHTADDYIKKKLSDRLFKLHDGTEVQRDWYSSFLLYCYDHMTHDIDKNKCNTKFEEQYNREKALITWIKANKLKILNSGIKIA

SEQ ID NO: 2544 - protein, 356 aa, unidentified
  REGION 1..356: note = Description of Unknown: uncultivated organism sequence
  REGION 1..356: note = Category: MG81 effectors
  REGION 1..356: note = Description: MG81-829 effector
METTKTLKLRIKDKHARVLSAMAREVNTVWNFCNETSHRSIRERFKWLSAYDLQKLTAGYSKCEGVQIGSATAQLVCEEYALRRRQFKKAKLRWRVSNPKSSKYSLGWIPFKVGGVKYKAGQVVFAGHKLSLWDSYGLADYELRAGSFVQDTRGRWYLCVAVKVQVKPSTATGSIGLDLGLKEAAVASDGQRIEGRFYRKLEAKLGIAQRAHKKQRVKALHAKIANQRKDMLHKFSTRLTKEYGAIFVGDVSSQKLVKTKMAKSTLDAGWSMLKTMLEYKSQQAGVVFEVVNESYTTQTCSCCGSIPASSPKGRAGLRIREWTCSDCGAVHNRDTNAARNILAAGLRRLEAGITVL

SEQ ID NO: 2545 - protein, 420 aa, unidentified
  REGION 1..420: note = Description of Unknown: uncultivated organism sequence
  REGION 1..420: note = Category: MG81 effectors
  REGION 1..420: note = Description: MG81-830 effector
MVSETGLEPAPHAPNARALPTELLTEKMVCVNGFEPLISCFRGKWSNQTLLYAVINKLLQLCVILTPYMKTLKLRLKDKHASVLIAMAKEVNTVWNFCNETSHKAIVERKKFLTSYDLDKLTAGYTKIDGVKINSRVMQSVSVEYVSRRKQFKKNKLAWRVSNGKASKRSLGWIPFKVDTIVYKSGQVKFAGYKFSLWDSYGLSQYKFRSGSFNQDARGRWYLNIAVEIEPFVGPQPQKSQIGIDLGLKSAVTCSDGKVLIGRNYRKYEKAIALSQRARTKKKTRNIHAKIKNTRKDELHKLSNELVRKNSMIFVGNVNGSKLAKTKMAKSTYDAGWYMFKTMLEYKCNYAGAVFEVVDESYTTQTCSTCLRLSGPQNLKGLGMREWICCGCQSVHDRDINSAQNILAVGLGRLAEGIAV

SEQ ID NO: 2546 - protein, 389 aa, unidentified
  REGION 1..389: note = Description of Unknown: uncultivated organism sequence
  REGION 1..389: note = Category: MG81 effectors
  REGION 1..389: note = Description: MG81-831 effector
MNNPLMPLSFTRTLRLKVRREAYPWLTRAAFETNQVFNYCNEASLLAATRTDLKRKWLTGFDLCNLTSGATKYFEHIGADTVQSICVHFAQKRIAAKKLKLRWRASGGAKRALGWIPFKAASVKRKGNSLRFAGKMFRVFNRDYLGEHKFRDGCFAQDACGDWYLCIPVHMPVEQTVAPREEVGIDLGVKTIATTSDGEKLEGGRWTHGGADKLAMAQRRGHKKQAKRIHRRVANQRKDALHKFSRKIVDQYQNIIVGDVSSKKLVKTKMAKSVLDSGWGMLKNMLDYKSQQAARTFSVVNESYTSITCSSCGSLTGPRGVNGLIVRSWICSECGDSHDRDVNAARNILTAARLSPSVRGNESSDSLIPSSRLRKHRRETRTESVRTAA

SEQ ID NO: 2547 - protein, 511 aa, unidentified
  REGION 1..511: note = Description of Unknown: uncultivated organism sequence
  REGION 1..511: note = Category: MG81 effectors
  REGION 1..511: note = Description: MG81-832 effector
MSKRNTTDTCCLTLPLKLEKWQEDRLSKRFEIARQIYNTLVHAELKKLRQVEQSAEYRQIQVQLREMYQNNTTKTKEFRDIANRRRKLLDAAGFREYDFKSAIKDYYKYFKENIGSNVAIHGIAPLVWTAFENKLYKNGKKVHYKRPGDIYSLRGYSVTGKSGGSEIMFRGTYVEWKGLKLPIKRSPDNDYETAMLEYRVKYVRILRKPGKHKNHWYAQLSLEGKPVIKMNPVSNEPVHPIGSGAVGIDIGPQTIAYASQSEAGLLELASQVQNIERQKGLLQRKMERSRRDMNPENYMPDGTFRRGVKLTKNKSKHYCKLQRELAYLQHRQVETRKRQHIELANHLLSLGDCFYVEDMKWLSLTHRAKETEISEKTGRIKRKKRFGKSIANKAPATLIGILDTKCKSLGIPGVVKVPTIMKASQYNHQSDTYEKKPLGQRWNDMPSGERIQRDLYSAFLLQHLEPDLTGYNKKMLAQDYPQFVEYHNHVINDLSMKPKTLASMGIRRRVS

SEQ ID NO: 2548 - protein, 383 aa, unidentified
  REGION 1..383: note = Description of Unknown: uncultivated organism sequence
  REGION 1..383: note = Category: MG81 effectors
  REGION 1..383: note = Description: MG81-833 effector
MQGEDDVPPGAKLHRPNRLDALCQGRDHPYRPNGSEDLQLPRQGRDERLIALGDAVNTVWNYFNEISMRSAQRGPIWAAKKQLRVLTKGSGKLLGLPSQVVQEMINQYVIKRKAARRPKLRWRASRGPRRALGWVPFTNQDIALDGTTVLLRGQRFRLWLHRAVEGRIKSGNFSQDARGRWYCNLVCEVPRSQGRGRDDIGVDLGLKSVAKCSDGTGLEQAQFYRCLEPKLAEAQRKRRKRQVKSIHAKIANRRKDVLHKFSRALVDRARKITVGDVSASAMTKTRMAKSVLDAGWSTLRGMLRYKCDHAGVAYAEVNEANTTRTCSFCGRLSGPTGLAGLSIRRWTCGECGSEHERDQNAARNIARLGCETPCPSGHGSPGF

SEQ ID NO: 2549 - protein, 579 aa, unidentified
  REGION 1..579: note = Description of Unknown: uncultivated organism sequence
  REGION 1..579: note = Category: MG81 effectors
  REGION 1..579: note = Description: MG81-834 effector
MAFGNKNSTPSFVLTLPMKVTEQDEIFLSKKFRVGCTVYNQMVTKTTKMWHQLRKTREYKNLVKAIKAAPANSDKRKALLVQRSNLIKQAGFSEGAFHKLVVPYQKAYNVNCDVAQKVASAVWKAWDDFFYGKGKTVHYKKLDDFVTLSGKKNNSGIFFRPANHTVSSMKSAKRKAKNSIEKKYFDAYRKPNTKKDKEVVLPDEVKAQMDKEVADATTKAKPCIGEGNLRIIYEKYEFLVKLRNPDIQTGWYQQEALKCGVKYCRIVRSWVGTKWKYYAQLVLEGYPPIKCDSNGVVKHHVKQGRVGIDIGTQTIAFCGKDVCDLRVLAPSAIAEVCNGLTKEIARIMRQMDRSRRAMNPQYFNENGTVKRLKRKNGHKQIRHWNYSKNYYRLLHKLRNLNRKLADVRKMEHYILANELLTYGNEFIVEDMNYKALQKRNKKTKINPKTGRAHSKKRFGKSIGRCAPAMFISILNQKANRYGGSVIKVSTFETKASQFDHTDDSYTKKKLSQRFAKLSDGTVVQRDLYSAFLLLHLRKNLQSYNKKTIKKDFPQFKKLHDETKERLKSSHEWLPTSVGF

SEQ ID NO: 2550 - protein, 381 aa, unidentified
  REGION 1..381: note = Description of Unknown: uncultivated organism sequence
  REGION 1..381: note = Category: MG81 effectors
  REGION 1..381: note = Description: MG81-835 effector
MVSLETPLTTRTVEGGHDMARTKPTKSIIQCQLKLKLRPAQERMLNRWLWHLTAVFNWAYKTVEHNANQGIYLSRYDLESRLAFHSGRMGIPARVLDGAARTAHDAWQRCFQRLARRPRMKGRRNRLNSILFRQVINRVECDRIFVSGFGMVRFHRQEIPAGRITGARLIRRSSGWYFSLFVEASPRSIPVLSSGEIGIDPGFVSLISLSTGEKVEQALELKQTAMRLAQSQRGSDRRLTARLKEREANQRKDRNHKLSRRLLSENALICWSKDSHRAIARTFGKSVASAAHGQLRQMLAYKCRAGGREFIEVPNRYSTMTCSACGARSGPTGYAGLSVRQWTCGCGASWDRDVNAALNTLIAGRGLRLERVGDGSSGIVT

SEQ ID NO: 2551 - protein, 363 aa, unidentified
  REGION 1..363: note = Description of Unknown: uncultivated organism sequence
  REGION 1..363: note = Category: MG81 effectors
  REGION 1..363: note = Description: MG81-836 effector
MSIQTKTLSVRVKDRHAAVLRQMAFEVNQVFNLANEITSEAYSNAGVFGAQVPKWLTAFDVQKMTTGIQRERGYSIGSATVQEVIAHHGKARKQFKRSRLRWRVSGGARRSLGWVPFKSKQAQWQNGCVKFAGHYFKVWDSYGLAGYKFRAGSFSEDSRGRWYFNICVEVATVHTTGATAVGIDLGLKDTATVSDGSKLIAGRFYRDLQPALGKAQQAGKKARVRAIYAKIKNRRKDALHKFSTALVNSHAAIFVGDVSSSKLAKTKMAKSVLDAGWAMLKTQLEYKAIARSVVFEVVNERYSTQACSCCGAISNNSPKGRAGLRIREWTCCECGTAHDRDVNAAKNILAAGHCRLAVGIPVL

SEQ ID NO: 2552 - protein, 538 aa, unidentified
  REGION 1..538: note = Description of Unknown: uncultivated organism sequence
  REGION 1..538: note = Category: MG81 effectors
  REGION 1..538: note = Description: MG81-837 effector
MDNEEKEKDGATCCLTLPLKLEKWQSDHLEKRFEIARQLYNTLVHAELKKKCQVERMPEYQEIMKMIDAASNQKEKWALEKKRKAFLEENGFSRNAFKADMEKYYKHFNDNIGANVALHGITAQVWIAFDKVFVDNYKQKGKVHFKKPGELCSVQGYSQKKSGGKEIMFREDRIIWNQQGNRDRKKVKREFLLKLSPDNPYEAEMLKRHVKFVRILRKDGKTKPHWYAQLVLEGKPAVKRDPASGAPKHPIGHGVVGIDIGTRTLAYSTDKEVNLLELADRVQNIEQEKRRLQRKMDRSRRAMNPENYNSDGTFKRGVKLTRNKSKRYRRIQHQLAMIQHHQADIRKQQHNELANYLLTLGDCFFVENMSYCDLVHRANKTEISEKTGRYKRKKRFGKSIANKAPAMLITMLKQKCQSRGLEGVKEVDTHVRASQYNHQTDTCIEKALENRWNVMPDGERIQRDLYSAFLLQHCKQGLPEYNRKELKKEFGEELYRVFDREALQRDYPQFVAYHHMTIQRLSELPHTIPSMGIRRIIS

SEQ ID NO: 2553 - protein, 349 aa, unidentified
  REGION 1..349: note = Description of Unknown: uncultivated organism sequence
  REGION 1..349: note = Category: MG81 effectors
  REGION 1..349: note = Description: MG81-838 effector
MSTKVYRYRVKSLNGLLNKQARAVNFVWNFCNDTQKHALKWRKRWPTGFDLNVLTAGSSKELGIHSGTINAVCEQYAKSRKQFKRPYLRYRGKRSLGWVPLKGRDLKRHGDAFRFAGNTFRVFNSRPLPEGKIKDGTCFSQDRRGNWFLNIVVDVADAETRKPVRGVGIDLGLADLATLSNGEKIEHPRCFRQLEEKLAKAQRARKKRLVAKIHAKIANTRMDFLHKASTDIVRRFDYIAVGNVSSGKLAKTKMAKSVYDASWHSFKTMLAYKSVANGAWYKEVNESFSSQACSACGALPESSPKGIAGLRIREWVCSECGAVHDRDVNAALNILRSGRRAPVVGIPAL

SEQ ID NO: 2554 - protein, 512 aa, unidentified
  REGION 1..512: note = Description of Unknown: uncultivated organism sequence
  REGION 1..512: note = Category: MG81 effectors
  REGION 1..512: note = Description: MG81-839 effector
MPTKQKEGGNRCVLTLPLLTEPWQEHIIEKRFKIIEHLKNQLISIELRKLKNLQRTKAYKNLIKQIESVPKSERTALYKERNKMLKDAGFSQYTFMDDMAGKKSLMQKHFESHINVQIAHKAAIDVWSSFEKFLFGTGQIVHYQKRGTLSSVASKSPKTGMFYYSDENIFKWSGGGTKPKGGIILCLRVASVKTNYEKEMVANNEIKYYRVVRKWMKTKYKYYLQITFAGKPADKHREISTGRVGIDIGTQTIAIASDKSVKLLEFADKVNKNHIKKCELQRKLDRSRRYTNPDNFNPDGTVKRGTKGHKLKWNKSKHYIEIAGKIRELERKNADIRKYQHTCLANDILAMGNQIYIEPMNYKGLQKRVKETQVDEKGRYKKKKRFGKSLANKAPAMFVTILKTKAEQHGGEVYEVDIMSYRASQCDHTTGEYTKHGLNDRWRILGNGDKVQRDLYSAFLIKNSNKTHDEIDLDKCSKTYDNFKKLHDKEIENIRNEVKLRERKNISSYGIA

SEQ ID NO: 2555 - protein, 495 aa, unidentified
  REGION 1..495: note = Description of Unknown: uncultivated organism sequence
  REGION 1..495: note = Category: MG81 effectors
  REGION 1..495: note = Description: MG81-840 effector
MAGKSDKACCVLTLPLLTEPWQEHIIEKRFRIMEHLKNSLIALELRKLKNIQRTKQYRQLEAEISNAPKENRKTLYKKRNELLKNAGFSEFAFIDDMTNMQKHFVEHIATQIAHKSASDVWSSFEKVLFNTGRKIHFIRRGSLSSIACKKDGNGMRFRNGMLHWNGGQCKNKVKLELRVACPKTPYECAMLEKKIKYERIIRKWVKTRYKYYVQFTLDGNAVPKPRKMGTGRVGIDIGPSSIAIASSQEVRLMELADKINQNHLRKVALQQKMDRSRRATNPDNFNENKTIRRGVKLSWHYSKHYQKLRGQVRELERKNADIRKYQHTCLANYILSLGTEVYIEQMNFKGLQARAKETTYNKNGRANRKKRFGKSIANRAPAMLVTILETKLKSYAGTELHKVNTWSYRASQYDHITDTYTKKLLRQRWAELGNGDRIQRDLYSAFLLMNSQPSLQSTDRERCSKTYSQFKSLHDQEIYRLQQTPERHLSSFGIA

SEQ ID NO: 2556 - protein, 352 aa, unidentified
  REGION 1..352: note = Description of Unknown: uncultivated organism sequence
  REGION 1..352: note = Category: MG81 effectors
  REGION 1..352: note = Description: MG81-841 effector
MILTYKYRIKNRSAKSALRRHAFAVNQVWNYCCAQQRDIESRYRAGAPKRKWASHYDLQRLCKGAGAMFGIHQQTIGGVCRTFAQARDKARHAPAFRKSYGVRRSLGWIPFEGQSRQIKDGAVTYLGKRFYLWGLKRRPIPATVKGGAFVEDALGRWYVCLTVEVERKPATNDKAIGIDLGLKSLATLSDGRKIEAPQIYRRYEQQLATLQRAGKRRHAKRLHAKIKACRADFLHKISTELAGQNAIIAVGNVNARDLASKSVLDAGWSSFRKMLAYKAKDYREVDERFTTQDCSACGARCGPKGQKGLGIRQWQCSSCGISHDRDVNAALNILAIARRSAAPPAEEYRRAA

SEQ ID NO: 2557 - protein, 350 aa, unidentified
  REGION 1..350: note = Description of Unknown: uncultivated organism sequence
  REGION 1..350: note = Category: MG81 effectors
  REGION 1..350: note = Description: MG81-842 effector
MITYTLKLRLNTKQEATLNTWLFNLTGVWNWSIKKIEHNAQDKIYFSAFDFVNLLSDHGKKLGIPSHTIQGVLSQAYTAWSRCFKKIGGKPKLKGQRNKLNSVVFPDRIHPPKENHISIPGIGKIRYHKQMLPKGNIKCGRIIKRASGWYLCLFIDAERAAIIRTGYGKIGIDPGFKSLLTLSTGEKIEHPRELEAVEKRLGQAQRGHDKQLAARLSERRANQAKDRNHKLSLRLVKENVLIAFSADNHKGIAKKFGKSVSSSGHYQLQKMLSYKSRIGGTEYREIDSRNSTKTCSSCGALTGPTGLNGLSVRRWVCSACGAVLDRDINAAINTLVGAGAAHEEGLQNVA

SEQ ID NO: 2558 - protein, 350 aa, unidentified
  REGION 1..350: note = Description of Unknown: uncultivated organism sequence
  REGION 1..350: note = Category: MG81 effectors
  REGION 1..350: note = Description: MG81-843 effector
MVQVQLKLKLTPRQERQLNRWLCHLTAVWNWGVKKIENDARDRVFYTPKAFQNLLANHSQKVEIPSHVLQGILADAYLAWSRCFKGIARRPRLKGFRNRLNSIPLIDPVKRWPDRRISIPTLGRIRHHKQEVPEGKVKCGRIVKRASGWYLCLFIDAEPNAIPHVSDSEIGIDPGFKDLLALSSGEKMSHPRELEASALRLAQAQRGVNRKQVARLHERIANQRKDRNHKLSRRLVSENQLIAFSADNHKNIAKKFGKSVASSSHGQLRSMLAYKCRAGGREYIEVPSRNSTKTCSTCGALSGPSGWAGLKVRLWTCAHCGAEHDRDVNAAINTLKVGLGMSLELSARAA

SEQ ID NO: 2559 - protein, 341 aa, unidentified
  REGION 1..341: note = Description of Unknown: uncultivated organism sequence
  REGION 1..341: note = Category: MG81 effectors
  REGION 1..341: note = Description: MG81-844 effector
MIRTYRYRIKDSSAAPQLNKLAQACNFVWNFCNESQEHALRWDQRWPTGFDLNKLTAGCSKELGLHSQTVQAVCEQYETRRKQFKKRKLRWRGKRSPGWVPFKAVGVKVIEDTVRYAGHTFRFWKSRELPGPIKCGSFSQDSRKRWYVNFVIEVPEMEATTGTRHIGIDLGLKTLATCSDGRKIEAPRWYRNQQRRIAEHQRKKRSRQARNLQAKIAHRRKDFLHKESDRLTKECELIVVGDVCSSGLAKTNMAKSVNDASWSTFKHLLEYKAIARKVVYREVSERFSTQTCSGCGAIGGPKGREGLGIREWVCGECGSVHDRDVNAALNILRLGHQSLVL

SEQ ID NO: 2560 - protein, 355 aa, unidentified
  REGION 1..355: note = Description of Unknown: uncultivated organism sequence
  REGION 1..355: note = Category: MG81 effectors
  REGION 1..355: note = Description: MG81-845 effector
MKTLKLRIKDKHCKVLDQLASEVNFVWNYVNDLCFKHLKRKGEFLSAYDIAKYTKGTSKECNLHSQTIQAVTEELVTRRKQFKKAKLRWRVSNKKSAKKSLGWIPFKKVAIKYANGYVQYGKHQFKLWDSYGLTQYSVKTGSFVEDSRGRWYVCLVVDSPQQDKPTAIQAIGIDLGLKDIATCSDGTVISNPKFYRKYEQKLGIAQRAKNKNRVRALHAKIANCRKDHLHKASTMLVKNNALIVVGDLSAQKLVKTKMAKSVLDTGFSALKTMLKYKCENAGVMFEEVNERFTTQTCSSCLRVSNNSPKGRAGLRIRVWKCECGSVNQRDLTSSKNILALGHKRLAVGITVLSGR

SEQ ID NO: 2561 - protein, 367 aa, unidentified
  REGION 1..367: note = Description of Unknown: uncultivated organism sequence
  REGION 1..367: note = Category: MG81 effectors
  REGION 1..367: note = Description: MG81-846 effector
MKTLKLRIRDKHIAKLNRLSGSVNFVWNYVNDLSYKHLQKTGKFFSAYDLNEYTKGSGELLGLHSQTIQAINETHAKSRKQFKKAKLNWRTNNPTSKRKSLGWLPFKQSAIKHIATHQTGKKGLKSTLQLSLAKGQKLVIDLWDSYNLSLYQINTCELVQDSRNRWYACITVKEYPKTTCGTGSVGIDLGLKDSATASNGDKLQIKQTLKYAKALAIAQRAKNKQRVKAIHAKIKNTRQDLIHKFTTQLVKDNALIVVGDVKTTQFNSKKGTLAKSVYDAGWFEMRRQLTYKCENAGCRFEIVNEKYTTQTCSCCGDMSSSLSGRAGLRIREWTCAKCGTRHDRDINASRNILAVGLDRLVEGIPER

SEQ ID NO: 2562 - protein, 536 aa, unidentified
  REGION 1..536: note = Description of Unknown: uncultivated organism sequence
  REGION 1..536: note = Category: MG81 effectors
  REGION 1..536: note = Description: MG81-847 effector
MSDEEYKKLLKQYHKLSDRHILVVETDMPYPDVLKVVALSDKIRKAGNELVSLMRKNYDQLMRTKKYRKLLKLYGNTEDKDKRKALADQLNDMQKSYNVTWDLCRTSMIPIGKKYSIDAVFALTKAEDIWRGMEKCLYDNGKTTHFSKYGELPCIRAKQINRGIPMFVEDGKLRFKLRKMQFGIQVNDRFQSDEVNAVLSYLENPDKMDADAVNTLIEEACCIDTYRPCYATLVPRLIRGKYRVYLHLTIEGKAKPKYDRSGNPRHKYGKGMIGADIGTQTVAYTSDTEVGLKNLSERGNSIQTSERKERLYYRAMDRSRRATNPQNYNPDGTIKKGKKTWKYSDRYKKLKAKHAELCRINAVNKQIAINEDANYLRSLGDTFVTEPKNASKLMKRAKKTTVNSKGRFNKKKRFGKSIKNRCPPGFQTTVEKKFKVTGGAYIEVPNNYRASQYDHTADDYIKKKLSDRLYRLRDGTLVQRDWYSSFLLYCYDYRTQDIDKDKCITDFGRCYDKEKALIAWIKANHIKILNSGIKVA

SEQ ID NO: 2563 - protein, 536 aa, unidentified
  REGION 1..536: note = Description of Unknown: uncultivated organism sequence
  REGION 1..536: note = Category: MG81 effectors
  REGION 1..536: note = Description: MG81-848 effector
MSDEEYKKLLKQYHKLSDRHILVVETDMPYPDVLKVVALSDKIRKAGNELVRLMRKNYDQLMRTKKYRKLLKLYGNTEDKDKRKALADQLNDMQKSYNVTWDLCRTSMIPIGKKYSIDAVFALTKAEDIWRGMEKCLYDNGKTTHFSKYGELPCIRAKQINRGIPMFVEDGKLRFKLRKMQFGIQVNDRFQSDEVNAVLSYLENPDKMDADAVNTLIEEACCIDTYRPCYATLVPRLIRGKYRVYLHLTIEGKAKPKYDRSGNPRHKYGKGMIGADIGTQTVAYTSDTEVGLKNLSERGNSIQTSERKERLYYRAMDRSRRATNPQNYNPDGTIKKGKKTWKYSNRYKKLKAKHAELCRINAVNRQLAINEDANYLRSLGDTFVTEPKNASKLMKRAKKTTVNSKGKFNKKKRFGKSIKNRCPSGFQTTVEKKFKVTGGAYIEVPNNYRASQYDHTADDYIKKKLSDRLYRLRDGTLVQRDWYSSFLLYCYDYRTQDIDKDKCITDFGRCYDKEKALIAWIKANHIKILNSGIKVA

SEQ ID NO: 2564 - protein, 536 aa, unidentified
  REGION 1..536: note = Description of Unknown: uncultivated organism sequence
  REGION 1..536: note = Category: MG81 effectors
  REGION 1..536: note = Description: MG81-849 effector
MSDEEYKKLLKQYHKLSDRHILVVETDMPYPDVLKVVALSDKIRKAGNELVRLMRKNYDQLMRTKKYRKLLKLYGNTEDKDKRKALANQLNDMQKSYDVTWDFCRTSMIPIGKKYSIDAVFALTKAEDIWRGMEKCLYDNGKTTHFSKYGELPCIRAKQINRGIPMFVEDGKLRFKLRKMQFGIQVNDRFQSDEVNAVLSYLENPDKMDADAVNTLIEEACCIDTYRPCYATLVPRLIRGKYRVYLHLTIEGKAKSKYDRFGNPRHKYGKGMIGADIGTQTVAYTSDTEVGLKNLSERGNSIQTAERKERLYYRAMDRSRRATNPQNYNPDGTIKKGKKTWKYSDRYKKLKAKHTELCRINAVNRQLAINEDANYLRSLGDTFVTEPKNASKLMKRAKKTTVNSKGKFNKKKRFGKSIKNRCPSGFQTTIEKKFKVTGGAYIEVPNNYRASQYDHTADDYIKKKLSDRLYRLRDGTLVQRDWYSSFLLYCYDYRTQDIDKDKCITDFGRCYDKEKALIAWIKANHIKILNSGIKVA

SEQ ID NO: 2565 - protein, 512 aa, unidentified
  REGION 1..512: note = Description of Unknown: uncultivated organism sequence
  REGION 1..512: note = Category: MG81 effectors
  REGION 1..512: note = Description: MG81-850 effector
MPTKQKEDSNRCVLTLPLLTEPWQEHIIEKRFKIIEHLKNQLISIELRKLKNLQRTKAYKNLIKQIESVPKSERTVLYKERNKMLKDAGFSQYTFMDDMAGKKSLMQKHFESHINVQIAHKAAIDVWSSFEKFLFGTGQIVHYQKRGTLSSVASKSPKTGMFYYPDENIFKWSGGGTKPKGGIILCLRVASVKTNYEKEMVANNEIKYYRVVRKWMKTKYKYYLQITFAGKPADKHREISTGRVGIDIGTQTIAIASDKSVKLLELADKVNKNHIKKCELQRKLDRSRRYTNPDNFNPDGTVKRGTKGHKLKWNKSKHYIEIAGKIRELERKNADIRKYQHTCLANDILAMGNQIYIEPMNYKGLQKRVKETQVDEKGRYKKKKRFGKSLANKAPAMFVTILKTKAEQHGGEVYEVDIMSYRASQCDHTTGEYTKHGLNDRWRILGNGDKVQRDLYSAFLIKNSNKTHDEIDLDKCSKTYDNFKKLHDKEIENIRNEVKLRERKNISSYGIA

SEQ ID NO: 2566 - protein, 416 aa, unidentified
  REGION 1..416: note = Description of Unknown: uncultivated organism sequence
  REGION 1..416: note = Category: MG81 effectors
  REGION 1..416: note = Description: MG81-851 effector
MIWLEKKSLMQKHFESHINVQIAHKAAIDVWSSFEKFLFGTGQIVHYQKRGTLSSVASKSPKTGMFYYSDENIFKWSGGGTKPKGGIILCLRVASVKTNYEKEMVANNEIKYYRVVRKWMKTKYKYYLQITFAGKPADKHREISTGRVGIDIGTQTIAIASDKSVKLLELADKVNKNHIKKCELQRKLDRSRRYTNPDNFNPDGTVKRGTKGHKLKWNKSKHYIEIAGKIRELERKNADIRKYQHTCLANDILAMGNQIYIEPMDYKGLQKRAKETQVDEKGRYKKKKRFGKSLANKAPAMFVTILKTKVEQHGGEVYEVDIMSYRASQCDHTTGEYTKHGLNDRWRILGNGDKVQRDLYSAFLIKNSNKTHDEIDLDKCSKTYDSFKKLHDTEIENIRNEVMLRERKNISSYGIA

SEQ ID NO: 2567 - protein, 512 aa, unidentified
  REGION 1..512: note = Description of Unknown: uncultivated organism sequence
  REGION 1..512: note = Category: MG81 effectors
  REGION 1..512: note = Description: MG81-853 effector
MPTKQKEGGNRCVLTLPLLTEPWKEHIIEKRFKIIEHLKNQLISIELRKLKNLQRTKAYKNLIKQIESVPKSERTVLYKERNKMLKDAGFSQYTFMDDMAGKKSLMQKHFESHINVQIAHKAAIDVWSSFEKFLFGTGQIVHYQKRGTLSSVASKSPKTGMFYYSDENIFKWSGGGTKPKGGIILCLRVASVKTNYEKEMVANNEIKYYRVVRKWMKTKYKYYLQITFAGKPADKHREISTDRVGIDIGTQTIAIASDKSVKLLELADKVNKNHIKKCELQRKLDRSRRYTNPDNFNPDGTVKRGTKGHKLKWNKSKHYLEIAGKIRELERKNADIRKYQHTCLANDILAMGNQIYIEPMNYKGLQKRAKETQVDEKGRYKKKKRFGKSLANKAPAMFVTILKTKAEQHGGEVYEVDIMSYRASQCDHTTGEYTKHGLNDRWRILGNGDKVQRDLYSAFLIKNSNKTHDEIDLDKCSKTYDNFKKLHDKEIENIRNEVILRKRRNISSYGIA

SEQ ID NO: 2568 - protein, 512 aa, unidentified
  REGION 1..512: note = Description of Unknown: uncultivated organism sequence
  REGION 1..512: note = Category: MG81 effectors
  REGION 1..512: note = Description: MG81-854 effector
MPTKQKEGGNRCVLTLPLLTEPWQEHIIEKRFKIIEHLKNQLISIELRKLKNLQRTKAYKNLMKRIEFVPKSERTALYKERNKMLKDAGFSQYTFMDDMAGKKSLMQKHFESHINVQIAHKAAIDVWSSFEKFLFGTGQIVHYQKRGTLSSVASKSPKTGMFYYSDENIFKWSGGGTKPKGGIILCLRVASVKTNYEKEMVANNEIKYYRVVRKWMKTKYKYYLQITFAGKPADKHREISTGRVGIDIGTQTIAIASDKSVKLLELADKVNKNHIKKCELQRKLDRSRRYTNPDNFNPDGTVKRGTKGHKLKWNKSKHYIEIAGKICELERKNADIRKYQHTCLANDILAMGNQIYIEPMNYKGLQKRVKETQVDEKGRYKKKKRFGKSLANKAPAMFVTILKTKAEQHGGEVYEVDIMSYRASQCDHTTGEYTKHGLNDRWRILGNGDKVQRDLYSAFLIKNSNKTHDEIDLDKCSKTYDSFKKLHDKEIENIRNEVKLRERKNISSYGIA

SEQ ID NO: 2569 - protein, 469 aa, unidentified
  REGION 1..469: note = Description of Unknown: uncultivated organism sequence
  REGION 1..469: note = Category: MG81 effectors
  REGION 1..469: note = Description: MG81-855 effector
MPTKQKEGGNRCVLTLPLLTEPWQEHIIEKRFKIIEHLKNQLISIELRKLKKLQRTKAYKNLIKQIESVPKSERTVLYKERNKMLKDAGFSQYTFMDDMAGKKSLMQKHFESHINVQIAHKAAIDVWSSFEKFLFGTGQIVHYQKRGTLSSVASKSPKTGMFYYSDENIFKWSGGGTKPKGGIILCLRVASVKTNYEKEMVANNEIKYYRVVRKWMKTKYKYYLQITFAGKPADKHREISTGRVGIDIGTQTIAIASDKSVKLLELADKVNKNHIKKCELQRKLDRSRRYTNPDNFNPDGTVKRGTKGHKLKWNKSKHYLEVAGKIRELERKNADIRKYQHTCLANDILAMGNQIYIEPMNYKGLQKRAKETQVDEKGRYKKKKRFGKSLANKAPAMFVTILKTKAEQHGGEVYEVDIMSYRASQCDHTTGEYTKHGLNDRWRILGNGDKVQRDLYSAFLIKNSNKTHD

SEQ ID NO: 2570 - protein, 537 aa, unidentified
  REGION 1..537: note = Description of Unknown: uncultivated organism sequence
  REGION 1..537: note = Category: MG81 effectors
  REGION 1..537: note = Description: MG81-856 effector
MISDEEYKKLLKQFHKLSDRHILVVETDMPYSDVLKVVILSDKIRKAGNELVSFMRKNYDQLIRTKKYRKLLKLYGSTKDKKKRKDLADQLNEMQKAYNVTWDYCRKSMIPIGKKYGIDAVFALTKAEDVWRGIEKCLYGNGKAIHFSKYGELPCIRAKQINRGISISVKDDRLQFKLGKTAFGIQVNDRFQQDEVDAVLTYLAEPEIVDNKAVNTLIEDAYYIDTYRPCYATLVIKMIRGKYRVYLHLTIEGKTKLKYDKHGNPRHKYGKGVIGADIGTQTVAYTSDTEVGLKNLSERGNSIQTSERKERLLYRAMDRSRRAANPQNYNEDGTVKKGRKTWKYSNHYKKLKAKHSELCRINAVNRQLAINEDANHLRSLGDTFVTEPKNASKLMKRAKETAVNDKGRFNKKKRFGKSIKNRCPSGFQTTVEKKFKTTGGTYIEVPNNYRASQYDHTVDDYIKKKLSDRLYKLQDGTEVQRDWYSSFLLYCYDYKIQNIDKNKCITKFDNCYKKEKALITWIKAHKIKVLNSGIKIA

SEQ ID NO: 2571 - protein, 364 aa, unidentified
  REGION 1..364: note = Description of Unknown: uncultivated organism sequence
  REGION 1..364: note = Category: MG81 effectors
  REGION 1..364: note = Description: MG81-857 effector
MVKTFSFRIKDSTSHKYLHAMARAVNYVWNYCNDIQKKAARSNRRWVNWVMLNNLTSGCSKELRLHSQTIQAIGECYATSLKEAKSPTGKKKRFLRFRGRRSQGWIPFKASGIKLRGDSAVYQGRRFKFWKTRDIPPTIKNGNFSCDSRGRWYLNLVCEYEETIVSNEGNVGIDLGLKSLATLSTGKKYDAQKFFRKYERKLAHHQRCNNSRQVQTIHAKIANSRKDFNHKVSHELTRDFNKIFVGDVGSLGLLKTKLAKSVSDASWGQLRTFIEYKAIARGGTYYVVDENNTTRTCSACGCLTGPSGLAGLRVREWQCKECGTVHDRDTNSAINIEQRGLLTLPSPLRTLSAKDSESLGIPRL

SEQ ID NO: 2572 - protein, 1268 aa, unidentified
  REGION 1..1268: note = Description of Unknown: uncultivated organism sequence
  REGION 1..1268: note = Category: MG81 effectors
  REGION 1..1268: note = Description: MG81-858 effector
MKVSKVNHRRAAVAVNKKSVTVNGILYDAPVKKNVKTGNMSAYVSSKYVIDNVVKNSSRLYSPFSSKRIVIDREKIRIADRLKQCYDNFVKYYLSNGSLNEQQMRFNPNNTYMADSRVHFCVPSGIDIESLINSIVDCSLRKSLKRTYRFETNYGEKNTFNLPDLVKKSIKIYCTDEKRKLNDREEQEMYVLFSYMYEDKYKDRQKVLIANSISNQATKVKVCDDESRLIKLSIADTKKKPLWDFIVDYANSDKNGQYTILRNIRKSIVLFVCGVDVYRNIENNDNLDIWKWEEYGIQESQLFVKIENCYTTKGEDIALNEIRNVNLDHYMKAIGVLDDERSKFWFQHYENTIEALFSKKSKRKIERIKTAYLCEYLWKNFCSYVALKYVDLGKGVYHFTMSDKLSLMNKNTNENGIKFGEVDSRFNKGISSFDYERIKAEETIDRNISTYTTFATNIFAKSVIKDSYRQKKAGNSDALQYDDETYYNRKAMNPYALKRVLRYWGGQSRWKSELEELNVAELCIDIKNRLSKIRNSGVHYTSTSALKGNDDDSIVGMLIKKDFDDIKDVYASKYYSNNVWMFYNTDKISKMMEYLYQDDSNIRDAQIPAFNSVIKRKDMAEVIEKIIKKNSYKTIKEPYQREKYRSCLYFMLKEIYYNRFIKQDNLKDQVIQIIDSNTELIGDNSRAVDNLKKRIHDVDSQTMSFGELCQVIMTDYNMQNQENKSIKSKERQDKDRKNGIDNSYKHFPLLLHHLIKVSFLKFIKTDEKLAFIREPRITELDKTLEQFEAQIQTVDIYNSLKMMVAENKSLLDWYTLAHFLMPKQLNHLIGDVKNYIQYLSNIDKRAGSVKNNKSASTEVKIRQYSEIVRILDFSLQYIGRVSNDVTDYFVDEDEYAAFLSKYVEFSGNDIVSMKAFCQSRTANGKHTIGLYCDGANPIMNRNIAYAKMYGNDEILSYIYNKVTKKDIEKYYVSQDNLEKVFADGKCQDVQQQNALCDFQKMKNHIELTEVSIYTDILNDFMAQFISWAYLRERDLMYFQLGLNYIRMFYGTYELEEKYYKLHGENINIEKGALLYQIVAMYSHELPIYKVDESGIAILAEKQGSSGASIKSFVTEYCKEEMKKAYTYENGLELFEDVNQHDDLSKLRNDFAHMRYMSARDKSIMDIVSEIYNGFFIYDTKLKKSVSFIFKNILMRYAVDVNIEFCHKGDNEDTNNLIRIKDEVGLYSDKYTYKVEDNDTVDIEVRNSEFLEQLKKLLEYKKESEGSEL

SEQ ID NO: 2573 - protein, 1268 aa, unidentified
  REGION 1..1268: note = Description of Unknown: uncultivated organism sequence
  REGION 1..1268: note = Category: MG81 effectors
  REGION 1..1268: note = Description: MG81-859 effector
MKVSKVNHRRAAVAVNKKSVTVNGILYDAPVKKNVKTGNMSAYVSSKYVIDNVVKNSSRLYSPFSSKRIVIDREKIRIADRLKQCYDNFVKYYLSNGSLNEQQMRFNPNNTYMADSRVHFCVPSGIDIESLINSIVDSSLRKSLKRTYRFETNYGEKNTFNLPDLVKKSIKIYCTDEKRKLNDREEQEMYVLFSYMYEDKYKDRQKVLIANSISNQATKVKVCDDESRLIKLSIADTKKKPLWDFIVDYANSDKNGQYTILRNIRKSIVLFVCGVDVYRNIENNDNLDIWKWEEYGIQESQLFVKIENCYTTKGEDIALNEIRNVNLDHYMKAIGVLDDERSKFWFQHYENTIEALFSKKSKRKIERIKTAYLCEYLWKNFCSYVALKYVDLGKGVYHFTMSDKLSLMNKNTNENGIKFGEVDSRFNKGISSFDYERIKAEETIDRNISTYTTFATNIFAKSVIKDSYRQKKAGNSDALQYDDETYYNRKAMNPYALKRVLRYWGGQSRWKSELEELNVAELCIDIKNRLSKIRNSGVHYTSTSALKGNDDDSIVGMLIKKDFDDIKDVYASKYYSNNVWMFYNTDKISKMMEYLYQDDSNIRDAQIPAFNSVIKRKDMAEVIEKIIKKNSYKTIKEPYQREKYRSCLYFMLKEIYYNRFIKQDNLKDQVIQIIDSNTELIGDNSRAVDNLKKRIHDVDSQTMSFGELCQVIMTDYNMQNQENKSIKSKERQDKDRKNGIDNSYKHFPLLLHHLIKVSFLKFIKTDEKLAFIREPRITELDKTLEQFEAQIQTVDIYNSLKMMVAENKSLLDWYTLAHFLMPKQLNHLIGDVKNYIQYLSNIDKRAGSVKNNKSASTEVKIRQYSEIVRILDFSLQYIGRVSNDVTDYFVDEDEYAAFLSKYVEFSGNDIVSMKAFCQSRTANGKHTIGLYCDGANPIMNRNIAYAKMYGNDEILSYIYNKVTKKDIEKYYVSQDNLEKVFADGKCQDVQQQNALCDFQKMKNHIELTEVSIYTDILNDFMAQFISWAYLRERDLMYFQLGLNYIRMFYGTYELEEKYYKLHGENINIEKGALLYQIVAMYSHELPIYKVDESGIAILAEKQGSSGASIKSFVTEYCKEEMKKAYTYENGLELFEDVNQHDDLSKLRNDFAHMRYMSARDKSIMDIVSEIYNGFFIYDTKLKKSVSFIFKNILMRYAVDVNIEFCHKGDNEDTNNLIRIKDEVGLYSDKYTYKVEDNDTVDIEVRNSEFLEQLKKLLEYKKESEGSEL

SEQ ID NO: 2574 - protein, 1073 aa, unidentified
  REGION 1..1073: note = Description of Unknown: uncultivated organism sequence
  REGION 1..1073: note = Category: MG81 effectors
  REGION 1..1073: note = Description: MG81-860 effector
MQVRDDVILGLDIGVGSLGWALLEEDLQTGEQRLLQRQTPQGETTYALGVRLFHVPENAKTKELLNVKRRTARMQRRTTARRAQRMRRVRALLDSLGVPGVRDADAFHLGKGRGAQCDPWQLRREGLERRLEAREWAVVLLHIAKHRGFRSNSKTDRSGSDKEMGQVLQAVSNLQQEVEASGLTVGALLASRERRRNRADHTGAPRYDLCMLRSLQENEVDILFTRQRELDNPLAGEEVRCRYAELAFAQRPLAPVSHMVGPCAFLEGERRAPRFAPTAELFRYVQALCNMRLRQETGEETPLSEEQRQAACTVFGSVQSVTYKKLRQVLRLPAGCRFAGLSYGVTEKGNVQDPEKADVVMRTGKCCQGTACLRGILGDAYEALHEQRLDEADAARLAATGALSAPAAALLARGMAGLRLTDAVARIVSELNDLDQIRAVLALLPLAAPRIAALSQAAGEGKLGIFQGTARLSLRAMEAILPHMLACGEYAAACELAGFDPRAAQKTDVTDIRNPVVLRVFREVRRQFSAICREFGFLPGRVHVELLREVGKSGEERNRISRGLERRTKEKEAARKAVAQLLGKSPETVSAGEVQRYELWRQQDGKCAYYMLWRHAGGERAYGDAMPQGSIPPDWLADGVNAVQVDHILPRSRTFDNSFHNLCLCCHAANQAKGGRTPWEWLGAAQPQAWHDFEQWVQSLPLKGLKKRNYLLRDLNAEVQGRFHARNLTDSGYVARLTLRWLEEEYARHDVPMQDADGRTRRRFFARPGQVTDFLRRHWGVQALKKIDGQRSGDRHHALDALLVAACSEGMLQRMVRAFQREENGPERLHIPCPWQDFSATVGRALGSVFVSRVERGRTKGPLHEETLRAIREERQPDGETRRVLYERKAVARLTAADLDKIKDAARCPDVVAALRRWLDAGKPGDALPRSAHGDIIRHVRVCAGEFSSGVVLQRGSGQAQASNGGMVRTDIYSRDGKFYMVPVYAKDVADKRLPLRACVAAKAEKDWREMTADYRFLFSLTPDCYVLTENRKGEVKEGYFAGANRNTSAISLSLAHDKQNVIQHRHHHVKAF

SEQ ID NO: 2575 - protein, 1098 aa, unidentified
  REGION 1..1098: note = Description of Unknown: uncultivated organism sequence
  REGION 1..1098: note = Category: MG81 effectors
  REGION 1..1098: note = Description: MG81-861 effector
MQVHDDVILGLDIGVGSLGWALLEEDLQTGEQRLLQRQTPQGETTYALGVRLFHVPENAKTKELLNVKRRTARMQRRTTARRAQRMRRVRALLDSLGVPGVRDADAFHLGKGRGAQCDPWQLRREGLERRLEAREWAVVLLHIAKHRGFRSNSKTDRSGSDKEMGQVLQAVSNLQQEVEASGLTVGALLASRERRRNRADHTGAPRYDLCMLRSLQENEVDILFTRQRELGNPLAGEEVRCRYAELAFAQRPLAPVSHMVGPCAFLEGERRAPRFAPTAELFRYVQALCNMRLRQETGEETPLSEEQRQAACAVFGSVQSVTYKKLRQVLRLPAGCRFAGLSYGVTEKGNVQDPEKADVVMRTGKCCQGTACLRGILGDAYEALHEQRLDEADAARLAATGALSAPAAALLARGMAGLRLTDAVARIVSELNDLDQIRAVLALLPLAAPQIAALSQAAGEGKLGIFQGTARLSLRAMEAILPHMLACGEYAAACELAGFDPRAAQKTDVTDIRNPVVLRVFREVRRQFSAICREFGFLPGRVHVELLREVGKSGEERNRISRGLERRTKEKEAARKAVAQLLGKSPETVSAGEVQRYELWRQQDGKCAYYMLWRHAGGERAYGDAMPQGSIPPDWLADGVNAVQVDHILPRSRTFDNSFHNLCLCCHAANQAKGGRTPWEWLGAAQPQAWHDFEQWVQSLPLKGLKKRNYLLRDLNAEVQGRFHARNLTDSGYVARLTLRWLEEEYARHDVPMQDADGRTRRRFFARPGQVTDFLRRHWGVQALKKIDGQRSGDRHHALDALLVAACSEGMLQRMVRAFQREENGPERLHIPCPWQDFSATVGRALGSVFVSRVERGRTKGPLHEETLRAIREERQPDGETRRVLYERKAVARLTAADLDKIKDAARCPDVVAALRRWLDAGKPGDALPRSAHGDIIRHVRVCAGEFSSGVVLQRGSGQAQASNGGMVRTDIYSRDGKFYMVPVYAKDVADKRLPLRACVAAKAEKDWREMTADYRFLFSLTPDCYVLTENRKGEVKEGYFAGANRNTSAISLSLAHDKQNVIQGIGITTLKRFEKYRVDRFGRLSLVRREADPRGRS

SEQ ID NO: 2576 - protein, 1098 aa, unidentified
  REGION 1..1098: note = Description of Unknown: uncultivated organism sequence
  REGION 1..1098: note = Category: MG81 effectors
  REGION 1..1098: note = Description: MG81-862 effector
MQVRDDVILGLDIGVGSLGWALLEEDLQTGEQRLLQRQTSQGETTYALGVRLFHVPENAKTKELLNVKRRTARMQRRTTARRAQRMRRVRALLDSLGVPGVRDADAFHLGKGRGAQCDPWQLRREGLERRLEAREWAVVLLHIAKHRGFRSNSKTDRSGSDKEMGQVLQAVSNLQQEVEASGLTVGALLASRERRRNRADHTGAPRYDLCMLRSLQENEVDILFTRQRELGNPLAGEEVRCRYAELAFAQRPLAPVSHMVGPCAFLEGERRAPRFAPTAELFRYVQALCNMRLRQETGEETPLSEEQRQAACTVFGSVQSVTYKKLRQVLRLPAGCRFAGLSYGVTEKGNVQDPEKADVVMRTGKCCQGTACLRGILGDAYEALHEQRLDEADAARLAATGALSAPAAALLARGMAGLRLTDAVARIVSELNDLDQIRAVLALLPLAAPRIAALSQAAGEGKLGIFQGTARLSLRAMEAILPHMLACGEYAAACELAGFDPRAAQKTDVTDIRNPVVLRVFREVRRQFSAICREFGFLPGRVHVELLREVGKSGEERNRISRGLERRTKEKEAARKAVAQLLGKSPEAVSAGEVQRYELWRQQDGKCAYYMLWRHAGGERAYGNAMPQGSIPPAWLADGVNAVQVDHILPRSRTFDNSFHNLCLCCHAANQAKGGRTPWEWLGAAQPQAWHDFEQWVQSLPLKGLKKRNYLLRDLSAEVQGRFHARNLTDSSYVARLTLRWLEEEYARHDVPMQDAEGRTRRRFFARPGQVTDFLRRHWGVQALKKIDGQRSGDRHHALDALLVAACSEGMLQRMVRAFQREENGPERLHIPCPWQDFSTTVGRALGSVFVSRVERGRTKGPLHEETLRAIREERQPDGETRRVLYERKAVARLTAADLDRIKDAARCPDVVAALRRWLDAGKPGDDLPRSAHGDIIRHVRVRAGEFSSGVILQRGSGQAQAKNGGIVRTDIYSRDGKFYMVPVYAKDVADKRLPLRACVAHKDEKDWLELTEDYHFLFSLTPDCYVLTENRKGEVKEGYFEGPDRGSANISLSLAHDKKNTIRGIGIQNLKRFEKYRVDRFGRLSLVRREADPRGRS

SEQ ID NO: 2577 - protein, 1134 aa, unidentified
  REGION 1..1134: note = Description of Unknown: uncultivated organism sequence
  REGION 1..1134: note = Category: MG81 effectors
  REGION 1..1134: note = Description: MG81-863 effector
MKYVIGMDIGIGSIGWSVIRSDADCKRIEDFGVRIFDPGENASDRKSNSQIRHEYRSVRRVLRRRKHRKELLKAHLENIGLTTIDRINEYFKHADGDIISLRVKGLDKKLAPEEIAACLINIANRRGYRPFYEKEELSQYEKTSLNKTRQFMLSGEYRTSAEMILKNEQFDSEESEYRSYRNRSGNEETVLIERKWLRDEVEKILKKQSEFYPCLNDRNTNAIKRIIFDQRDFEDGPGDKNDPFRRYTGFLESMGQCRFYPDEKRGYRATLTADTYSLVNELSQYSYVDENGCFVFDSALAHDLIESALKNAKFTKSDFNKICKAHGIVPIYGGKGKDTDISRCFKFLKAIKPILEADGFDWETVCNIDTASDPDSILNRIGIIVSENITPARRKKALKNLNILNDDSITALCNYKFGGTSSVSYKYMSGAIEAFLKGDIYGKHQASHIEETATESVKHTKLPVFDKDFEFFKNPVVFRAINESRKVINAIIEKYGSPSAINIEVGSEVSRSFANRTADKNEQTKRMKEKDAAKKAIAELLGVDIASVTSKMIDRYFLGELQGWKCLYSGKEINKEECLRGSKAYEIDHIVPFSLILDNTLNNKALVLTNENQLKKQQTPLMYLSGERRKKFIGTVNELFRAKKIKKKKYAYLLQPDLNDEKMSEWKSRNLNDMRYISRFMVGYLKENLKFDNSSKSEGRWQNVYAVKGSLTSMFRKLWLNETTWGRADKASIKAETYLDHAVDAVVIGNCLPVYVEIAQVNLRLRDIYKSNGRQFVAEYWDCFNKGVEMISRYYNIDKDTVRAFLKKSDRIPSLIPDLREEVDRRFVDHAIYSKYQKEIADHEGKDFEKPTYEEAEQAYRTSMENLYPTDLQFAHSLSMPLISCKPERKFSGKITADNPVKLREIDGKLYTLSKKEIGKIERKDIEKIYTSDTQLIAYLIELFDGAKDTATLGDIMKEKGISEIRTKNGNAIRKLTLRNICNKDFLKKEIDENNYTYLDTAKYYCVELYKDIKNQLQVQGIKRADIILQNGKLCLAPWYKQPDDYFKHVMYLQKNDYLKVYKNGKLSFCGYYRSAAGLTNSRLYFIIDNQPEDKKKYITLKLEVKKYSVDILGKIGKKEIKCGEPLSSAKVKK

SEQ ID NO: 2578 - protein, 1323 aa, unidentified
  REGION 1..1323: note = Description of Unknown: uncultivated organism sequence
  REGION 1..1323: note = Category: MG81 effectors
  REGION 1..1323: note = Description: MG81-864 effector
MKVSKVDHTSAGVTSKKDITYNGLLYRNPPKKGVNEILKDAETDEKILENMENYITRLNNRASSLYSVFNPIGNEKSQAKNPEQKDLYQNISSYFTEFVRDIKNNSADTASRNLLNRSFTVNSDKETIDNFVARYLRKSLQKRVNGYELSEIIRNIIYLKANLYRKEDVPVKEVCILAEAIKEDITKERQIKKMAASIVKQDVKIQTYLSDDGKVLLRHTFAKHSKKSALFRFLQRFTSVDIEEQEEMIRELRALVVLFYCGPNAYKEAQGDGIGVWTFGKTASDVRVNFCEEACRLITEYQAELERVETEKKEKSSNVKPVNTDIYKEKIKKAIRYSIAGSYQEAARTLKETEGFEDKRLWLGLIEEYAERILLSNRRFMDPGTQNCEFLCKRTMQMLISYIAMKLVDLGKAVYHFAMPAQIDVTNGKSAEFGEVQPSFRDGITSFDYEWIKAEESLTRELSTYSVFAVRNFLNSISKKESDIIAVNLNDVESGNLKSNSVMRVLRYFGGKKEWQDTYIGEVSENELINALRKEIGAARNSTFHYAGTIDNGITDDDKLIISQIYEKEHGDIGRIRRKKYYSNNALMFYKKTDIDALMDYLYSAPKDHPAQIPAFNKILNKNKVYEFSKFIKGNPKKKISTAGKTEELKGCVFYMLKECYYYGFLPDSRSAQFVKEALEDIVKSAEDADPAATDRRLEAAQNFKKRFYEISEKASLGQICQRIMTDFQLQNGGQKKGQSSKYAKKGVGEPIYQHFRMMLYDILRKAFWKYLNTLTETGEMNFMFMREPSYKPEFAAEEEFCKDWNDHSYDDIREGMEEDSYLEAWFTAAHFIAPAQLNHLIGSFKKYEQFTSDIKYRAEGNGIDCNSRWQSRIQEDEMHRLLRVLEFVQMTSGTFSKEISDYYGRDEDSAIEEYAEFVENFVEFSTKKMPNKHVALQTFCNTAVKSGSPNGKIGIYYDGEKPILNRNIVMADMYGNVSLISNCMKKVTEREIKVFYNDMNNLTEVFKRGVCQNEDEQKRLKAFQNNKNRVELLDVAIYTEIVNELYAQLVSWSYLRERDLMYYQLGVNYMKLFNGNSVPKDSFLRIIQGNGANITEGAVLYQLVAMNSFGWPLLCRDGSADKKANTTGQKVASFFMDYCRKDASIYESCLMLFERLQSHDAIIKEIRNPIDHMHYFEKGKNGATKSILEMYGDIYDRFFDYDLKLKKSVSFVLQNILLDHFIIAHTVMNRQEGKYKYKNKDGQEKSYTGTKLAIRPNREQKKKVFDKTIRKMKEISIIHYGMESDILTYKIKKDGKPVLVKADARSRMFLDQMQRILEYSKT

SEQ ID NO: 2579 - protein, 1034 aa, unidentified
  REGION 1..1034: note = Description of Unknown: uncultivated organism sequence
  REGION 1..1034: note = Category: MG81 effectors
  REGION 1..1034: note = Description: MG81-865 effector
MARVLGLDIGIGSCGWAVVETPEIDEATGKVQGEAAIVACGTRCFDVPEEPKTKELKNKTRRLLRGQRRVLRRRRQRIAQIRRLLATHGLPADPGPLPAGAPGDLVWRLRAQGLDRRLEPAEWARVLIHIANHRGFKSNSKRDRGNKSESGKMLKAIAATGQKLADWRSFGEMLARDPDFAARKRNRTGEYALTPLRADLEREVARLFEAQRRLANPASSPALEAAYRELAFAQRPVAAREPPVGRCAFLEGEKRAPRHAPSFERFRFLAKLATVKVIPMGERPRFLTDEERPRAIGLLGRQELVTYKALRNALELPPSTVFADLPQRKADPESAPFARFDGTLALREGLGKRRFTELLRSAPEKLDAAMEALVWLDDLDQIRARLAASGLDPADVAALTGDEALARFAGFKGAGHISTAACRALIPHLEHGRGYAEACAALGWDHAKAGVPRIEEVANPVVRKILRECTRQIAVVLAEHGPVDAVHLEMARDVGKSAEERNEIRKGMDERAAQRDRHREEFRKLLGHAPNDEELLRYELWKEQNHRCPYTFPDEAAYIPPECLLATDNRVQVDHILPYSRSGDDSFRNKVLCYVRANQEKRRRTPYEWLGDDPQRWRLFEARIAGLADMHHQKRRKLLMRTFADREQAYRARHLQDTRYAMRVLRFALEAQFPTDARRRLFPRPGAITALLRRAWGLDELKKGGALGDRDHALDAIVVAFTTESLLNRLTRLHQELEEIGSGRATPLVETPLGSSPQARERFRQMVKAAAEGVFVSRPETRRGRGPAHDATLYGFERTPEGQEIQYERKNVWELKAADLDRLKGDPARHRVLREVLGAWLQRAEERRVKPEKLWREEPPRLPNGPPVRSVVLVRAKTTAGVKLQRGNALAHADQASMVRVDVFTKGGKFFLVPIYAWQVAKLETPPFLAIKSLADEDGWYPIDDTYAFLWSLYPGSFIKAVNRKGERFEGYFRSLDRSNGRISFSPPGNGDSKAQERFTTKTLQVFEKYHVDRLGRLHRIEREPRLWHGAVCS

SEQ ID NO: 2580 - protein, 1098 aa, unidentified
  REGION 1..1098: note = Description of Unknown: uncultivated organism sequence
  REGION 1..1098: note = Category: MG81 effectors
  REGION 1..1098: note = Description: MG81-866 effector
MQVRDDVILGLDIGVGSLGWALLEEDLQTGEQRLLQRQAPQGETSYALGVRLFNVPENAKTKELLNVKRRTARMQRRTTARRAQRMRRVRALLDSLGVLGVRDADAFHLGKGRGAQCDPWQLRREGLERRLEAREWAVVLLHIAKHRGFRSNSKTDSSGSDKEMGQVLQAVSNLQQEVEASGLTVGALLASRERRRNRADHTGAPRYDLCMLRSLQEDEVNILFTRQRELGNPLAGEDIRCRYAELAFAQRPLAPVSHMVGPCAFLEGERRAPRFAPTAELFRYVQALCTMRLRQETGEETPLSEEQRQAACAVFGSVQSVTYKKLRQVLRLPAGCRFVGLSYGVTEKGKVQDPEKADVVMRTGKCCQGTACLRGILGDAYDALHEQRLDEADAARLAATDALSAPAAALLARGMAGLRLTDALVRIVSELNDLGQIRAILALLPLPAPRIAALSQAAGEGKLGFFQGTARLSLRAMEAILPHMQACGEYAAACELAGFDPRAAQKTDVTDIRNPVVLRVFREVRRQFSAICREFGFLPGRVHVELLREVGKSGEERNRISRGLERRTKEKEAARKAVAQLLGKSPEAVSAGEVQRYELWRQQDGKCAYYMLWRHAGGERAYGNAMPQGSIPPAWLADGVNAVQVDHILPRSRTFDNSFHNLCLCCHAANQAKGGRTPWEWLGAAQPQAWHDFEQWVQSLPLKGLKKRNYLLRDLSAEVQGRFHARNLTDSSYVARLTLRWLEEEYARHDVPMQDAEGRTRRRFFARPGQVTDFLRRHWGVQALKKIDGQRSGDRHHALDALLVAACSEGMLQRMVRAFQREENGPERLHIPCPWQDFSATVGRALGSVFVSRVERGRTKGPLHEETLRAIREERQPDGETRRVLYERKAVARLTAADLDRIKDAARCPDVVAALRRWLDAGKPGDALPRSAHGDIIRHVRVCAGEFSSGVVLQRGSGQAQASNGGMVRTDIYSRDGKFYMVPVYAKDVADRRLPLRACVAAKAEKDWREMTADYRFLFSLTPDCYVLTENRKGEVKEGYFIGSDRSTAAISLSLAHDRQQSLRGIGITTLKRFEKYRVDRFGRLSPVRREADPRGRS

SEQ ID NO: 2581 - protein, 313 aa, unidentified
  REGION 1..313: note = Description of Unknown: uncultivated organism sequence
  REGION 1..313: note = Category: MG81 effectors
  REGION 1..313: note = Description: MG81-867 effector
MVANNEIKYYRVVRKWMKTKYKYYLQITFAGKPADKHREISTGRVGIDIGTQTIAIASDKSVKLLELADKVNKNHIKKCELQRKLDRSRRYTNPDNFNPDGTVRRGTKGHKLKWNKSKHYLEIAGKIRELERKNSDIRKYQHTCLANDILAMGNQIYIEPMNYKGLQKRAKETQVDEKGRYKKKKRFGKSLANKAPAMFVTILKTKAEQHGGEVYEVDIMSYRASQCDHTTGEYTKHGLNDRWRILGNGDKVQRDLYSAFLIKNSNKTHDEIDLDKCSKTYDSFKKLHDTEIENIRNEVMLRERKNISSYGIA

SEQ ID NO: 2582 - protein, 500 aa, unidentified
  REGION 1..500: note = Description of Unknown: uncultivated organism sequence
  REGION 1..500: note = Category: MG81 effectors
  REGION 1..500: note = Description: MG81-868 effector
MLTLPLLTEPWQEHIIEKRFKIIEHLKNQLISIELKKLKNLQRTKAYKNLIKQIESVPKSERTALYKERNKMLKDAGFSQYTFMDDMAGKKSLMQKHFESHINVQIAHKAAIDVWSSFEKFLFGTGQMIHYQKRGTLSSVASKSPKTGMFYYSDENIFKWSGGGTKPKGGIILCLRVASVKTNYEKEMVANNEIKYYRVVRKWMKTKYKYYLQITFAGKPADKHREISTGRVGIDIGTQTIAIASDKSVKLLELADKVNKNHIKKCELQRKLDRSRRYTNPDNFNPDGTVKRGTKGHKLKWNKSKHYLEIAGKIRELERKNADIRKYQHTCLANDILAMGNQIYIEPMNYKGLQKRAKETQVDEKGRYKKKKRFGKSLANKAPAMFVTILKTKVEQHGGEVYEVDIMSYRASQCDHTTGEYTKHGLNDRWRILGNGDKVQRDLYSAFLIKNSNKTHDEIDLDKCSKTYDSFKKLHDKEIENIRNEVKLRERRNISSYGIA

SEQ ID NO: 2583 - protein, 192 aa, unidentified
  REGION 1..192: note = Description of Unknown: uncultivated organism sequence
  REGION 1..192: note = Category: MG81 effectors
  REGION 1..192: note = Description: MG81-869 effector
MCLEYLILYPDSNEHIRKYQHTCLANDILAMGNQIYIEPMNYKGLQKRAKETQVDEKGRYKKKKRFGKSLANKAPAMFVTILKTKAEQHGGEVYEVDIMSYRASQCDHTTGEYTKHGLNDRWRILGNGDKVQRDLYSAFLIKNSNKTHDEIDLDKCSKTYDSFKKLHDKEIENIRNEVILRKRRNISSYGIA

SEQ ID NO: 2584 - protein, 1099 aa, unidentified
  REGION 1..1099: note = Description of Unknown: uncultivated organism sequence
  REGION 1..1099: note = Category: MG81 effectors
  REGION 1..1099: note = Description: MG81-870 effector
MQVRDDVILGLDIGVGSLGWALLEEDLQTGEQRLLQRQTPQGETTYALGVRLFHVPEKNAKTKELLNVKRRTARMQRRTTARRAQRMRRVRALLDSLGVPGVRDADAFHLGKGRGAQCDPWQLRREGLERRLEAREWAVVLLHIAKHRGFRSNSKTDRSGSDKEMGQVLQAVSNLQQEVEASGLTVGALLASRERRRNRADHTGAPRYDLCMLRSLQENEVDILFTRQRELGNPLAGEEVRCRYAELAFAQRPLAPVSHMVGPCAFLEGERRAPRFAPTAELFRYVQALCNMRLRQETGEETPLSEEQRQAACAVFGSVQSVTYKKLRQVLRLPAGCRFAGLSYGVTEKGNVQDPEKADVVMRTGKCCQGTACLRGILGDAYEALHEQRLDEADAARLAATGALSAPAAALLARGMAGLRLTDALVRIVSELNDLGQIRALLALLPLPAPRIAALSQAAGEGKLGFFQGTARLSLRAMEAILPHMLACGEYAAACELAGFDPRAAQKTDVTDIRNPVVLRVFREVRRQFSAICREFGFLPGRVHVELLREVGKSGEERNRISRGLERRTKEKEAARKAVAQLLGKSPETVSAGEVQRYELWRQQDGKCAYYMLWRHAGGERAYGDAMPQGSIPPDWLADGVNAVQVDHILPRSRTFDNSFHNLCLCCHAANQAKGGRTPWEWLGAAQPQAWHDFEQWVQSLPLKGLKKRNYLLRDLNAEVQGRFHARNLTDSGYVARLTLRWLEEEYARHDVPMQDADGRTRRRFFARPGQVTDFLRRHWGVQALKKIDGQRSGDRHHALDALLVAACSEGMLQRMVRAFQREENGPERLHIPCPWQDFSATVGRALGSVFVSRVERGRTKGPLHEETLRAIREERQPDGETRRVLYERKAVARLTAADLDKIKDAARCPDVVAALRRWLDAGKPGDALPRSAHGDIIRHVRVCAGEFSSGVILQRGSGQAQAKNGGIVRTDIYSRDGKFYMVPVYAKDVADKRLPLRACVAHKDEKDWLELTEDYHFLFSLTPDCYVLTENRKGEVKEGYFEGPDRGSANISLSLAHDKKNTIRGIGIQNLKRFEKYRVDRFGRLSLVRREADPRGRS

SEQ ID NO: 2585 - protein, 512 aa, unidentified
  REGION 1..512: note = Description of Unknown: uncultivated organism sequence
  REGION 1..512: note = Category: MG81 effectors
  REGION 1..512: note = Description: MG81-871 effector
MPTKQKEGGNRCVLTLPLLTEPWQEHIIEKRFKIIEHLKNQLISIELRKLKNLQRTKAYKNLIKQIESVPKSERTALYKERNKMLKDAGFSQYTFMDDMAGKKSLMQKHFESHINVQIAHKAAIDVWSAFEKFLFGSGQMIHYQKRGTLSSVASKSPKTGMFYYSDENIFKWSGGGTKPKGGIILCLRVASVKTNYEKEMVANNEIKYYRVVRKWMKTKYKYYLQITFAGKPADKHREISTGRVGIDIGTQTIAIASDKSVKLLELADKVNKNHIKKCELQRKLDRSRRYTNPDNFNPDGTVKRGTKGHKLKWNKSKHYLEVAGKIRELERKNADIRKYQHTCLANDILAMGNQIYIEPMNYKGLQKRAKETQVDEKGRYKKKKRFGKSLANKAPAMFVTILKTKAEQHGGEVYEVDIMSYRASQCDHTTGEYTKHGLNDRWRILGNGDKVQRDLYSAFLIKNSNKTHDEIDLDKCSKTYDSFKKLHDKEIENIRNEVKLRERRNISSYGIA

SEQ ID NO: 2586 - protein, 353 aa, unidentified
  REGION 1..353: note = Description of Unknown: uncultivated organism sequence
  REGION 1..353: note = Category: MG81 effectors
  REGION 1..353: note = Description: MG81-872 effector
MPTKQKEGGNRCVLTLPLLTEPWQEHIIEKRFKIIEHLKNQLISIELRKLKKLQRTKAYKNLIKQIESVPKSERTVLYKERNKMLKDAGFSQYTFMDDMAGKKSLMQKHFESHINVQIAHKAAIDVWSSFEKFLFGTGQIVHYQKRGTLSSVASKSPKTGMFYYSDENIFKWSGGGTKPKGGIILCLRVASVKTNYEKEMVANNEIKYYRVVRKWMKTKYKYYLQITFAGKPADKHREISTGRVGIDIGTQTIAIASDKSVKLLELADKVNKNHIKKCELQRKLDRSRRYTNPDNFNPDGTVKRGTKGHKLKWNKSKHYLEVAGKIRELERKNADKGVTVWVQILLKVNFANP

SEQ ID NO: 2587 - protein, 521 aa, unidentified
  REGION 1..521: note = Description of Unknown: uncultivated organism sequence
  REGION 1..521: note = Category: MG81 effectors
  REGION 1..521: note = Description: MG81-873 effector
MLILGRRMYMPTKQKEDSNRCVLTLPLLTEPWQEHIIEKRFKIIEHLKNQLISIELRKLKNLQRTKAYKNLIKQIESVPKSERTALYKERNKMLKDAGFSQYTFMDDMAGKKSLMQKHFESHINVQIAHKAAIDVWSSFEKFLFGTGQIVHYQKRGTLSSIASKSPKTGMFYYSDENIFKWSGGGTKPKGGIILCLRVASVKTNYEKEMVANNEIKYYRVVRKWMKTKYKYYLQITFAGKPADKHREISTGRVGIDIGTQTIAIASDKSVKLLELADKVNKNHIKKCELQRKLDRSRRYTNPDNFNSDGTVKRGTKGHKLKWNKSKHYIEIAGKIRELERKNADIRKYQHTCLANDILAMGNQIYIEPMNYKGLQKRAKETQVDEKGRYKKKKRFGKSLANKAPAMFVTILKTKAEQHGGEVYEVDIMSYRASQCDHTTGEYTKHGLNDRWRILGNGDKVQRDLYSAFLIKNSNKTHDEIDLDKCSKTYDNFKKLHDKEIENIRNEVKLRERKNISSYGIA

SEQ ID NO: 2588 - protein, 512 aa, unidentified
  REGION 1..512: note = Description of Unknown: uncultivated organism sequence
  REGION 1..512: note = Category: MG81 effectors
  REGION 1..512: note = Description: MG81-874 effector
MPTKQKEGGNRCVLTLPLLTEPWQEHIIEKRFKIIEHLKNQLISIELRKLKKLQRTKAYKNLIKQIESVPKSERTVLYKERNKMLKDAGFSQYTFMDDMAGKKSLMQKHFESHINVQIAHKAAIDVWSSFEKFLFGTGQIVHYQKRGTLSSVASKSPKTGMFYYSDENIFKWSGGGTKPKGGIILCLRVASVKTNYEKEMVANNEIKYYRVVRKWMKTKYKYYLQITFAGKPADKHREISTGRVGIDIGTQTIAIASDKSVKRLELADKVNKNHIKKCELQRKLDRSRRYTNPDNFNPDGTVKRGTKGHKLKWNKSKHYLEVAGKIRELERKNADIRKYQHTCLANDILAMGNQIYIEPMNYKGLQKRAKETQVDEKGRYKKKKRFGKSLANKAPAMFVTILKTKAEQHGGEVYEVDIMSYRASQCDHTTGEYTKHGLNDRWRILGNGDKVQRDLYSAFLIKNSNKTHDEIDLDKCSKTYDSFKKLHDKEIENIRNEVILRKRRNISSYGIA

SEQ ID NO: 2589 - protein, 583 aa, unidentified
  REGION 1..583: note = Description of Unknown: uncultivated organism sequence
  REGION 1..583: note = Category: MG81 effectors
  REGION 1..583: note = Description: MG81-875 effector
MVLRVFREVRRQFSAICREFGFLPGRVHVELLREVGKSGEERNRISRGLERRTKEKEAARKAVAQLLGKSPETVSAGEVQRYELWRQQDGKCAYYMLWRHAGGERAYGDAMPQGSIPPAWLADGVNAVQVDHILPRSRTFDNSFHNLCLCCHAANQAKGGRTPWEWLGAAQPQAWHDFEQWVQSLPLKGLKKRNYLLRDLNAEVQGRFHARNLTDSGYVARLTLRWLEEEYARHDVPMQDADGRTRWRFFARPGQVTDFLRRHWGVQALKKIDGQRSGDRHHALDALLVAACSEGMLQRMVRAFQREENGPERLHIPCPWQDFSATVGRALGSVFVSRVERGRTKGPLHEETLRAIREERQPDGETRRVLYERKAAARLTAADLDKIKDAARCPDVVAALRRWLNAGKPGDALPRSAHGDIIRHVRVCAGEFSSGVVLQRGSGQAQASNGGMVRTDIYSRDGKFYMVPVYAKDVADKRLPLRACVAAKAEKDWREMTADYRFLFSLTPDCYVLTENRKGEVKEGYFAGANRNTSAISLSLAHDKQNVIQGIGITTLKRFEKYRVDRFGRLSLVRREADPRGRS

SEQ ID NO: 2590 - protein, 512 aa, unidentified
  REGION 1..512: note = Description of Unknown: uncultivated organism sequence
  REGION 1..512: note = Category: MG81 effectors
  REGION 1..512: note = Description: MG81-876 effector
MPTKQKEGGNRCVLTLPLLTEPWQEHIIEKRFKIIEHLKNQLISIELRKLKNLQRTKAYKNLIKQIESVPKSERTALYKERNKMLKDAGFSQYTFMDDMAGKKSLMQKHFESHINVQIAHKAAIDVWSSFEKFLFGTGQIVHYQKRGTLSSVASKSPKTGMFYYPDENIFKWSGGGTKPKGGIILCLRVASVKTNYEKEMVANNEIKYYRVVRKWMKTKYKYYLQITFAGKPADKHREISTGRVGIDIGTQTIAIASDKSVKLLELADKVNKNHVKKCELQRKLDRSRRYTNPDNFNPDGTVKRGTKGHKLKWNKSKHYIEIAGKIRELERKNTDIRKYQHTCLANDILAMGNQIYIEPMNYKGLQKRAKETQVDEKGRYKKKKRFGKSLANKAPAMFVTILKTKAEQHGGEVYEVDIMSYRASQCDHTTGEYTKHGLNDRWRILGNGDKVQRDLYSAFLIKNSNKTHDEIDLDKCSKTYDNFKKLHDKEIENIRNEVILRKRRNISSYGIA

SEQ ID NO: 2591 - protein, 540 aa, unidentified
  REGION 1..540: note = Description of Unknown: uncultivated organism sequence
  REGION 1..540: note = Category: MG81 effectors
  REGION 1..540: note = Description: MG81-877 effector
MATTDKKDEENLRAYKFRLDPNQAQTTALYQAVGAARYTYNMLTAYNLEVNRLRDDYWKRRHDEDISDADIKKELNALAKEDKRYKQLNYGAFGTQYLTPEKKRHEQAEHRIENGEDPSVVWNQETERSANPWLHTANQRVLVSGLQNASDAWDNFWASRTGKRAGRLVGTPRFKKKGVSRDSFTVPAPEKMGAYGTAYLRGEPAYKQGRRKITDYRHVRLSYLGTIRTFNSTKPLVKAVVAGAKIRSYTVSRNADRWYVSFLVKFSEPIRRSATKRARAAGSVGVDLGVKYLASLSDSEAPQRFPNLKFVEGLPSLENPRWSEASSRRLHKLQRALARSQKGSNRRSRLVKQIARLHHMTALRRESNLQQLTKKLATGYTLVGFEDLNVSGMTASAKGTVENPGKNVAQKSGLNRVVLDAAFGVFRNQLEYKAVWYGSAFEKVNRYFASSQTCSECGRKAKTKLTLRDRVFDCAYCGNMMDRDLNAAVNICREAQRLFDEKLASEDRESLNGRGSRGALRGAETVEASRPPASHRRGSP

SEQ ID NO: 2592 - protein, 1098 aa, unidentified
  REGION 1..1098: note = Description of Unknown: uncultivated organism sequence
  REGION 1..1098: note = Category: MG81 effectors
  REGION 1..1098: note = Description: MG81-878 effector
MQVHDDVILGLDIGVGSLGWALLEEDLQTGEQRLLQRQTPQGETTYALGVRLFHVPENAKTKELLNVKRRTARMQRRTTARRAQRMRRVRALLDSLGVPGVRDADAFHLGKGRGAQCDPWQLRREGLERRLEAREWAVVLLHIAKHRGFRSNSKTDRSGSDKEMGQVLQAVSNLQQEVEASGLTVGALLASRERRRNRADHTGAPRYDLCMLRSLQENEVDILFTRQRELDNPLAGEEVRCRYAELAFAQRPLAPVSHMVGPCAFLEGERRAPRFAPTAELFRYVQALCNMRLRQETGEETPLSEEQRQAACAVFGSVQSVTYKKLRQVLRLPAGCRFAGLSYGVTEKGNVQDPEKADVVMRTGKCCQGTACLRGILGDAYEALHEQRLDEADAARLAATGALSAPAAALLARGMAGLRLTDAVARIVSELNDLDQIRAVLALLPLAAPRIAALSQAAGEGKLGIFQGSARLSLRAMEAILPHMLACGEYAAACELAGFDPRAAQKTDVTDIRNPVVLRVFREVRRQFSAICREFGFLPGRVHVELLREVGKSGEERNRISRGLERRTKEKEAARKAVAQLLGKSPETVSAGEVQRYELWRQQDGKCAYYMLWRHAGGERAYGDAMPQGSIPPDWLADGVNAVQVDHILPRSRTFDNSFHNLCLCCHAANQAKGGRTPWEWLGAAQPQAWHDFEQWVQSLPLKGLKKRNYLLRDLNAEVQGRFHARNLTDSGYVARLTLRWLEEEYARHDVPMQDADGRTRRRFFARPGQVTDFLRRHWGVQALKKIDGQRSGDRHHALDALLVAACSEGMLQRMVRAFQREENGPERLHIPCPWQDFSATVGRALGSVFVSRVERGRTKGPLHEETLRAIREERQPDGETRRVLYERKAVARLTAADLDKIKDAARCPDVVAALRRWLDAGKPGDALPRSAHGDIIRHVRVCAGEFSSGVVLQRGSGQAQASNGGMVRTDIYSRDGKFYMVPVYAKDVADKRLPLRACVAAKAEKDWREMTADYRFLFSLTPDCYVLTENRKGEVKEGYFAGANRNTSAISLSLAHDKQNVIQGIGITTLKRFEKYRVDRFGRLSLVRREADPRGRS

SEQ ID NO: 2593 - protein, 1268 aa, unidentified
  REGION 1..1268: note = Description of Unknown: uncultivated organism sequence
  REGION 1..1268: note = Category: MG81 effectors
  REGION 1..1268: note = Description: MG81-879 effector
MKVSKVNHRRAAVAVNKKSVTVNGILYDAPVKKNVKTGNMSAYVSSKYVIDNVVKNSSRLYSPFSSKRIVIDREKIRIADRLKQCYVNFVKYYLSNGSLNEQQMRFNPNNTYMADSRVHFCVPSGIDKESLIDSIVDSSLRKSLKRTYRFETNYGEKITFNLPDLVKKSIKIYCTDEKRKLNDREEQEMYVLFSYMYEDKYKDRQKVLIANSISNQATKVKVCDDESSLIKLSIADTKKKPLWDFIVDYANSDKNGQYTILRNIRKSIVLFVCGVDVYRNIENNDNLDIWKWEEYGIQESQLFVKIENCYTTKDEDIALNEIRNVNLDHYMKAIGVLDDERSKFWFQHYENTIEALFSKKSKRKIERIKTAYLCEYLWKNFCSYVALKYIDLGKGVYHFTMSDKLSLMNKNTNENGIKFGEVDSRFNKGISSFDYERIKAEETIDRNISTYTTFATNIFAKSVIKDSYIQKKAGNSDALQYDDETYYNRKAMNPDALKRVLQYWGGQSRWKSELEELNVAELCIDIKNRLSKIRNSGVHYTSTSTLKGNDDDSIVGMLIKKDFDDIKDVYASKYYSNNVWIFYNTDKISKMMEYLYQDDSNIRDAQIPAFNSVIKRKDMAEVIEKIIKKNSYKTIKEPYQREKYRSCLYFMLKEIYYNRFIKQDDLKDQVIQIIDSNTELIGDNSRAVDNLKKRIHDVDSQTMSFGELCQVIMTDYNMQNQENKSIKSKERQDKDRKNGIDNSYKHFPLLLHHLIKVSFLKFIKTDEKLAFIREPRITEYDKTLEQFEAQIQTVDIYNSLKMMVAENKSLLDWYTLAHFLMPKQLNHLIGDIKNYIQYLSNIDKRAGSVKNNKSASTEVKIRQYSEIVRILDFSLQYIGRASNDVTDYFVDEDEYAAFLSKYVEFSGNNTVSMKAFCQSRTANGKHTIGLYFDGANPIMNRNIVYAKMYGNDEILSYIYNKVTKKDIEKYYVSQDNLEKVFADGKCQDVQQQNALCDFQKMKNHIELTEVSIYTDILNDFMAQFISWAYFRERDLMYFQLGLNYIRIFYGTYELEEKYNKLHGENINIEKGALLYQIVAMYSHELPIYKVDESDIAILAEKQGSSGASIKSFVTEYCKEEMKKAYTYENGLELFEDVNRHDNLSKLRNDFAHMRYMSARDKSIMDIVSEIYNGFFIYDTKLKKSVSFIFKNILMRYAVDVNIEFCHKGDNEDTNNLIRIKDEVGLYSDKYTYKVEDNDTVDIEVRNSEFLEQLKKLLEYKKESKGSEL

SEQ ID NO: 2594 - protein, 512 aa, unidentified
  REGION 1..512: note = Description of Unknown: uncultivated organism sequence
  REGION 1..512: note = Category: MG81 effectors
  REGION 1..512: note = Description: MG81-880 effector
MPTKQKEGGNRCVLTLPLLTEPWQEHIIEKRFKIIEHLKNQLISIELRKLKKLQRTKAYKNLIKQIESVPKSERTVLYKERNKMLKDAGFSQYTFMDDMAGKKSLMQKHFESHINVQIAHKAAIDVWSSFEKFLFGTGQIVHYQKRGTLSSVASKSPKTGMFYYSDENIFKWSGGGTKPKGGIILCLRVASVKTNYEKEMVANNEIKYYRVVRKWMKTKYKYYLQITFAGKPADKHREISTGRVGIDIGTQTIAIASDKSVKLLELADKVNKNHIKKCELQRKLDRSRRYTNPDNFNPDGTVKRGTKGHKLKWNKSKHYLEVAGKIRELERKNADIRKYQHTCLANNILAMGNQIYIEPMNYKGLQKRAKETQVDEKGRYKKKKRFGKSLANKAPAMFVTILKTKAEQHGGEVYEVDIMSYRASQCDHTTGEYTKHGLNDRWRILGNGDKVQRDLYSAFLIKNSNKTHDEIDLDKCSKTYDSFKKLHDKEIENIRNEVILRKRRNISSYGIA

SEQ ID NO: 2595 - protein, 512 aa, unidentified
  REGION 1..512: note = Description of Unknown: uncultivated organism sequence
  REGION 1..512: note = Category: MG81 effectors
  REGION 1..512: note = Description: MG81-881 effector
MPTKQKEGGNRCVLTLPLLTEPWQEHIIEKRFKIIEHLKNQLISIELRKLKNLQRTKAYKNLMKRIESVPKSERTALYKERNKMLKDAGFSQYTFMDDMAGKKRLMQKHFESHINVQIAHKAAIDVWSSFEKFLFGTGQIVHYQKRGTLSSVASKSPKTGMFYYSDENIFKWSGGGTKPKGGIILCLRVASVKTNYEKEMVANNEIKYYRVVRKWMKTKYKYYLQITFAGKPADKHREISTGRVGIDIGTQTIAIASDKSVKLLELADKVNKNHIKKCELQRKLDRSRRYTNPDNFNPDGTVKRGTKGHKLKWNKSKHYLEVAGKIRELERKNADIRKYQHTCLANDILAMGNQIYIEPMNYKGLQKRAKETQVDEKGRYKKKKRFGKSLANKAPAMFVTILKTKAEQHGGEVYEVDIMLYRASQCDHTTGEYTKHGLNDRWRILGNGDKVQRDLYSAFLIKNSNKTHDEIDLDKCSKTYDNFKKLHDKEIENIRNEVKLRERRNISSYGIA

SEQ ID NO: 2596 - protein, 482 aa, unidentified
  REGION 1..482: note = Description of Unknown: uncultivated organism sequence
  REGION 1..482: note = Category: MG81 effectors
  REGION 1..482: note = Description: MG81-885 effector
MPTKQKEGGNRCVLTLPLLTEPWQEHIIEKRFKIIEHLKNQLISIELRKLKNLQRTKAYKNLMKRIESVPKSERTALYKERNKMLKDAGFSQYTFMDDMAGKKSLMQKHFESHINVQIAHKAAIDVWSSFEKFLFGSGQMIHYQKRGTLSSVASKSPKTGMFYYSDENIFKWSGGGTKPKGGIILCLRVASVKTNYEKEMVANNEIKYYRVVRKWMKTKYKYYLQITFAGKPADKHREISTGRVGIDIGTQTIAIASDKSVKLLELADKVNKNHIKKCELQRKLDRSRRYTNPDNFNPDGTVKRGTKGHKLKWNKSKHYLEIAGKIRELERKNADIRKYQHTCLANDILAMGNQIYIEPMNYKGLQKRAKETQVDEKGRYKKKKRFGKSLANKAPAMFVTILKTKAEQHGGEVYEVDIMSYRASQCDHTTGEYTKHGLNDRWRILGNGDKVQRDLYSAFLIKNSNKTHDEICLLYTSDAAAN

SEQ ID NO: 2597 - protein, 1134 aa, unidentified
  REGION 1..1134: note = Description of Unknown: uncultivated organism sequence
  REGION 1..1134: note = Category: MG81 effectors
  REGION 1..1134: note = Description: MG81-886 effector
MKYVIGMDIGIGSIGWSVIRSDADCKRIEDFGVRIFEPGENASDRKSNSQIRREYRSVRRVLRRRKHRKELLKAHLENIGLTTIDRINEYFKHADGDIISLRVKGLDKKLAPEEIAACLINIANRRGYRPFYENEELSQYEKTSLNKTRQFMLSGEYRTSAEMILKNEQFDSEESEYRSYRNRSGNEETVLIERKWLRDEVEKILKKQSEFYPCLNDRNTNAIKRIIFDQRDFEDGPGDKNDPFRRYTGFLESMGQCRFYPDEKRGYRATLTADTYSLVNELSQYSYVDENGCFVFDSALAHDLIASALKNAKLTKSDFNKICKAHGIVPIYGGKGKDTDISRCFKFLKAIKPILEADGFDWETVCNIDTASDPDSILNRIGIIVSENITPARRKKALKNLNILNDDSITALCNYKFGGTSSVSYKYMSGAIEAFLNGDIYGKHQASHIEETATESVKHTKLPVFDKDFEFFKNPVVFRAINESRKVINAIIEKYGSPSAINIEVGSEVSRSFANRTADKNEQTKRMKEKDAAKKAIAELLGVDIASVTSKMIDRYFLGELQGWKCMYSGKEINKEECLRGSKAYEIDHIVPFSLILDNTLNNKALVLTSENQLKKQQTPLMYLSGERRKNFIGTVNELFRAKKIKKKKYAYLLQPDLNDEKMSEWKSRNLNDMRHISRFMVGYLKENLKFDNSSKSEGRWQNVYAVKGSLTSMFRKLWLNETTWGRADKASIKAETYLDHAVDAVVIGNCLPVYVEIAQVNLRLRDIYKSNGRQFVAEYWDCFNKGVEMISRYYNIDKDTVRAFLKKSDRIPSLIPDLREEVDRRFVDHAIYSKYQKEIADHEGKKFKEPTYEEAEQAYRVSMENLYPTDLQFAHGLSMPLISCKPERKYRGEITAANPVKLREIDGKLYTLSKKEIGKIERKDIEKIYTSDANLIAYLIELFDGAKDTATLGDIMKEKGISEIRTKNGNAIRKLTLRNICNKDFLKKEIDENNHTYLDTAKYYCVELYKDIKNQLQVQGIKRADIILQNGKLCLAPWYKQPDDYFKHVMYLQKNDYLKVYKNGKLSFCGYYRSAAGLTNSRLYFIIDNQPEDKKKYITLKLEVKKYPVDILGKIGKKEIKCGEPLSSAKVKK

SEQ ID NO: 2598 - protein, 1134 aa, unidentified
  REGION 1..1134: note = Description of Unknown: uncultivated organism sequence
  REGION 1..1134: note = Category: MG81 effectors
  REGION 1..1134: note = Description: MG81-887 effector
MKYVIGMDIGIGSIGWSVIRSDADCKRIEDFGVRIFDPGENASDRKSNSQIRREYRSVRRVLRRRKHRKELLKAHLENIGLTTIDRINEYFKHADGDIISLRVKGLDKKLAPEEIAACLINIANRRGYRPFYENEELSQYEKTSLNKTRQFMLSGEYRTSAEMILKNEQFDSEESEYRSYRNRSGNEETVLIERKWLRDEVEKILKKQSEFYPCLNDRNTNAIKRIIFDQRDFEDGPGDKNGPFRRYTGFLESMGQCRFYPDEKRGYRATLTADTYSLVNELSQYSYVDENGCFVFDSALAHDLIASALKNAKFTKSDFNKICKAHGIVSIYGGKGKDTDISRCFKFLKAIKPILEADGFDWETVCNIDTASDPDSILNRIGIIVSENITPARRKKALKNLNILNDDSITALCNYKFGGTSSVSYKYMSGAIEAFLNGDIYGKHQASHIEETATESVKHTKLPVFDKDFEFFKNPVVFRAINESRKVINAIIEKYGSPSAINIEVGSEVSRSFANRTADKNEQTKRMKEKDAAKKAIAELLGVDIASVTSKMIDRYFLGELQGWKCLYSGKEINKEECLRGSKAYEIDHIVPFSLILDNTLNNKALVLTSENQSKKQQTPLMYLSGERRKNFIGTVNELFRAKKIKKKKYAYLLQPDLNDEKMSEWKSRNLNDMRHISRFMVGYLKENLKFDNSSKSEGRWQNVYAVKGSLTSMFRKLWLNETTWGRADKASIKAETYLDHAVDAVVIGNCLPVYVEIAQVNLRLRDIYKSNGRQFVAEYWDCFNKGVEMISRYYNIDKDTVRAFLKKSDRIPSLIPDLREEVDRRFVDHAIYSKYQKEIADHEGKKFKEPTYEEAEQAYRVSMENLYPTDLQFAHGLSMPLISCKPERKYRGEITAANPVKLREIDGKLYTLSRKEIGKIERKDIEKIYTSDTQLIAYLIELFDGAKDTATLGDIMKEKSISEIRTKNGNAIRKLTLRNICNKDFLKKEIDENNHTYLDTAKYYCVELYKDIKNQLQVQGIKRADIILQNGKLCLAPWYKQPDDYFKHVMYLQKNDYLKVYKNGKLSFCGYYRSAAGLTNSRLYFIIDNQPEDKKKYITLKLEVKKYSVDILGKIGKKEIKCGEPLSSAKVKK

SEQ ID NO: 2599 - protein, 558 aa, unidentified
  REGION 1..558: note = Description of Unknown: uncultivated organism sequence
  REGION 1..558: note = Category: MG81 effectors
  REGION 1..558: note = Description: MG81-888 effector
MVKKTSTDADTTLRAYKFRLDPTQAQKIALAQCAGAARYAYNLLTAHNLEVSRTRADYWHTRIDAGADETTVKADLKALAKSDVAYKSIGYAAYGTQYLTPEINRHRAASNAITDGADPTAVWPETERSSEPWMHTIPRRVLVSGLQSADKAWKNFFDSRTGARAGRLVGTPRFKRKGSSRDSFTVHHETTGAYGTYYHKKDPEYARRKAQLKRRGINAKPTITDYRHVRLSHLGVIRTHNTTKPLVKAVRAGAQIRSYTVSRAANRWYVSILVELTRPSATPTHAQRSAGAVGVDLGVRYLAVLSDEQAPQRFARYPSLEFTGDGAPTLANPRWARAAEKRLVRLQRALARAQKGSKRRARLVQQIARHHHLVALRRESGLHQVSKRLTTGYTLIGLEDLAVAGMTASAAGTVEAPGKNVRQKAGLNRSILDAAFSTLRRQLEYKSSWYGSQVQIIDRFFASSQTCSACGARTKTKLDLRVRVFECAACGVRIDRDVNAARNIRAEAVRMYEAQLAPGTGESLNGRGATDSDAAGSVALGDVALDAPRPAASGGGSP

SEQ ID NO: 2600 - protein, 567 aa, unidentified
  REGION 1..567: note = Description of Unknown: uncultivated organism sequence
  REGION 1..567: note = Category: MG81 effectors
  REGION 1..567: note = Description: MG81-889 effector
MAKRKKHQITEYEKCLREYHKASPRHVIVLETDLLEDEKRHLFHQADLLRQCGNELLGIMKRHLDQLLRTKKYRGLRKSYGKISKSIKNLQQIKKLSNVQKQHLKDLQKDLRTISNLMNEMQKSYHVTWEYCRNTMKTLRLKYEQTSVIALSRAEDIWTAVSKVLYSDGERLHFKKRGDLSELRAKQFHKEIIGRVKNGFLEFRYGKVSLPVIRKETDLWLMNELEAVESYLKDPDFHDAYAINQMQQGEIVSTYRPCYASIVCKTIRGKLRVYLHLTVEGLPFSKRTNDGIIKHPYGNGPVGCDIGTQTIAYTSDHTVGLENLAERGNSICYVERWQRLVQRAMDRSRRAMNPDNYNDDGTIRKGKKTWIKSKRYQKLQLRYRELCRISAENRRLAIHEQVHKMRSLGDIFVTEAKNAKKLQKRANPENPLDKNGRPKRKKRFGRSIQNRCPGYFQAKVKQLFESTGGTYIEVPSDYRASQYDHTVDDYIKKKLSQRMYNLKDGTKVQRDWYSSFLLYCIDLITKTIDRQKCLATFETQLNKEHAMIEEIIHLKKHIMNSGIRVAV

SEQ ID NO: 2601 - protein, 1134 aa, unidentified
  REGION 1..1134: note = Description of Unknown: uncultivated organism sequence
  REGION 1..1134: note = Category: MG81 effectors
  REGION 1..1134: note = Description: MG81-890 effector
MKYVIGMDIGIGSIGWSVIRSDADCKRIEDFGVRIFDPGENASDRKSNSQIRREYRSVRRVLRRRKHRKELLKAHLENIGLTTIDRINEYFKHADGDIISLRVKGLDKKLAPEEIAACLINIANRRGYRPFYENEELSQYEKTSLNKTRQFMLSGEYRTSAEMILKNEQFDSEESEYRSYRNRSGNEETVLIERKWLRDEVEKILKKQSEFYPCLNDRNTNAIKRIIFDQRDFEDGPGDKNDPFRRYTGFLESMGQCRFYPDEKRGYRATLTADTYSLVNELSQYSYVDENGCFVFDSALAHDLIASALKNAKFTKSDFNKICKAHGIVPIYGGKGKDTDISRCFKFLKAIKPILEADGFDWETVCNIDTASDPDSILNRIGIIVSENITPARRKKALKNLNILNDDSITALCNYKFGGTSSVSYKYMSGAIEAFLNGDIYGKHQASHIEETATESIKHTKLPVFDKDFEFFKNPVVFRAINESRKVINAIIEKYGSPSAINIEVGSEVSRSFANRTADKNEQTKRMKEKDAAKKAIAELLGVDIASVTSKMIDRYFLGELQGWKCLYSGKEINKEECLRGSKAYEIDHIVPFSLILDNTLNNKALVLTSENQLKKQQTPLMYLSGEQRKNFIGTVNELFRAKKIKKKKYAYLLQPDLNDEKMSEWKSRNLNDMRYISRFMVGYLKENLKFDNSSKSEGRWQNVYAVKGSLTSMFRKLWLNETTWGRADKASIKAETYLDHAVDAVVIGNCLPVYVEIAQVNLRLRDIYKSNGRQFVAEYWDCFNKGVEMISRYYNIDKDTVRAFLKKSDRIPSLIPDLREEVDRRFVDHAIYSKYQKEVADHEGKDFKKPTYEEAEQAYRVSMENLYPTDLQFAHGLSMPLISCKPERKYRGEITAANPVKLREIDGKLYTLSKKEIGKIERKDIEKIYTSDANLIAYLIELFDGAKDTATLGDIMKEKGISEIRTKNGNAIRKLTLRNICNKDFLKKEIDENNHTYLDTAKYYCVELYKDIKNQLQVQGIKRADIILQNGKLCLAPWYKQPDDYFKHVMYLQKNDYLKVYKNGKLSFCGYYRSAAGLTNSRLYFIIDNQPEDKKKYITLKLEVKKYPVDILGKIGKKEIKCGEPLSSAKVKK

SEQ ID NO: 2602 - protein, 359 aa, unidentified
  REGION 1..359: note = Description of Unknown: uncultivated organism sequence
  REGION 1..359: note = Category: MG81 effectors
  REGION 1..359: note = Description: MG81-891 effector
MRGYSVTGKSGGVEIIFRETYIEWKGLKLPLKRSPDNAYETEMLSRRVKYVRLLRKPGKRKDRWYAQLSLEGKPAIKHDPESGELRHAIGRGAVGLDIGPQTLAYSACGAADLVELADQVQNIEQMKRRLQRKLDRSRRATNPDNYADNGTIRRGVKLTHNKSNRYRRTQRELRYLQHCQAEIRKRQHIELANHLLALGDCFYVEDMAWPSLTHRAKETAISEKTGRIKRKKRFGKSVANKAPATLIGILEQKCNSLGLPGVMKVPTSLRASQYNHQSGEYTSKPLSQRWNDMPDGERIQRDLYSAFLLQHYDPQAGNFNSALLQQDYPQFVQYHHRAIQRLSTAPKTLSSMGIQRSLR

SEQ ID NO: 2603 - protein, 495 aa, unidentified
  REGION 1..495: note = Description of Unknown: uncultivated organism sequence
  REGION 1..495: note = Category: MG81 effectors
  REGION 1..495: note = Description: MG81-892 effector
MPKEEKESCCVLQLRLYPEPWQVQIIETRFKVLEHLKNSLIALELRKLRNLERTRAYREIQEQIKLADDKSKIKLYAKRRKLLKDAGFSEFVFKDDITPMQKHFAAHIATHVAHRAASEVWRAFDKFLFGNGKMVHYVRRGTLRSASNQTAGTTMTLENGYFKWNGGRDQNSIAINIRVAKPTTYYEKEMLQKKAKYFRIVRKWGKIGYKYYLQITLAGLPAVKPRLIANEKKVGIDIGPSSIAIVSDKKVELRALADKVQNNHIEKCSLQRSMDRSRRNLNPQNYNEDGTIRRGIRLNWTFSKHYIEMRGKVRMLERKNVDIRKYQHTCLANEVILLGTDVYIEQMSFKGLQRRAKETTYREDGRPKRKKRFGKSIANRAPAMFVEILGRKLTTIVGTELNKVDTFKFRASQYDHTNGSYKKKLLKERWAQLSNGDRIQRDLYSAFLLKNSNADLNSTNVEQCNATYDAFKIMHDDCITKLKSEKKSCLPSFGV

SEQ ID NO: 2604 - protein, 521 aa, unidentified
  REGION 1..521: note = Description of Unknown: uncultivated organism sequence
  REGION 1..521: note = Category: MG81 effectors
  REGION 1..521: note = Description: MG81-893 effector
MMVTWKGGIPVGKSSTDTCCLTLPLKLEKWQEDRLAKRFEIARQIYNTMVRAELKKLDRVKQLPEYRKNQKEIQALDGKNSADRARLKELRANQNRILQKQGFTKYGFKSDSKDYYKHFIENIGSSVATHCIAPQVWNAFDKMLFQKDGKVVHFKRYGDVHSLKGGSVTNKSGGAEIMFRKTYIEWKGLKLPLKLSPNNAYEAEMLSYRVKYVRILRTRGKTKDRWYAQLSLEGKPAVKYDSSTGKPVHPVGRGAVGLDIGPQTLAYAAANEANLVELADQVQNIEQEKRRLQRKLDRSRRATNPDNYNENGTIRRGVKLTHNKSKRYCKLQKELSWIQHCQAETRKRQHIALANHLLSLGDCFYVEPMAWPSLTHRAKKTEVSEETGRIKRKKRFGKSVANKAPASLIGILRLKCISLGLTGVVEVPMLLRASQYNHQSKDYAKKSLSQRWNDMPDGNRIQRDLYSAFLLQHYNSQSESFDQETLERDYPQFVRLHNQTIQRLSALPKTPSSMGIRRSVS

SEQ ID NO: 2605 - protein, 541 aa, unidentified
  REGION 1..541: note = Description of Unknown: uncultivated organism sequence
  REGION 1..541: note = Category: MG81 effectors
  REGION 1..541: note = Description: MG81-894 effector
MVQSTADAEAKSVMYRAYKFRLDPNNEQVKALYQAAGAARYTYNMMTAYNLEIKKNRDEFWYAHITEDSDEQYKKQVESQLKALEKAEPARYKPLCQYASFSTQKLTPAKHKHKEVSEAIAQGVLPNDAWGSEEHPKNPWLHEANQRVLVSGLQNSAKAWKNFWDSQTGRRKGAKVNLPRLKKRGISRDSFTVPAPEAMGGYGAPYKNDSEQYKRLKKKGKDAVIQDYRHVRLSYLGVLRTFNSTKPLAKAVNTGAKIKSYTVSRNADRWYVSFLVELSEPIARPATKKQRAAGGVGIDLGVKTLVTLSDESNPYIANLRPGQRAQRKLKKLQQKFARSQKGSNRRARLAAEIARLHHKVALRRKGYLDQVTKGLVTQYSAVACEDLNVSGMVHSAKGTVENPGKNVAAKSGLNRSILDASFGMFIRQLEYKSAWYGSVVLKVDKWFPSSRTCFNCGEVKSKLPLSERVYDCQYCGYSADRDLNAARNILEQAYKEKEDKQNPQFAPERGENSNGRGRGSTCSVESGETSRPADGSAGHRR

SEQ ID NO: 2606 - protein, 519 aa, unidentified
  REGION 1..519: note = Description of Unknown: uncultivated organism sequence
  REGION 1..519: note = Category: MG81 effectors
  REGION 1..519: note = Description: MG81-895 effector
MIQPELKAYRRCSDRHVLVLETNLTYVEKCQIFHYADLVRKAGNELTGIMKKRYDQLVRTKRYRKLKSLYKKYKDADNKKALKDICDQMKEMQKQYDVTWDYCRTSMIPIGKKYGIDAVFALTKAENVFRGIEKCLYSDGETIHFKKRGDLPCIRAKQINRGIIMKQMNFKFKDIEFGVKIKDRYEQEEVNAILYYLKHAEFMDFIAANTYKETNICISTYRPCYVSLVCKKIRGKLRVYVHITIEGLSKPKQDRFGNFKHNKGKGIVGCDIGTQTIAYTTETKAGLKNLAERGSCIEVNERKERRIYRAMDRSRRAMNPDNYNEDGTIKKGKKKWTYSNRYKKLRTKHTELCRINATNRHLAINEDVNELRSLGDVFVTEPKNAKKLQKKAKTGKRKKRFGRSIKNRCPGYFQSQAKRKFRIYVEVPNDYKASQYDHTSDEYIKKSLSQRMYKLSDGTMVQRDLYSSFLLYCIDLNTNRIDKNKCIHEFKKQYKNQNETIEYIQMNQIKVMNSGIRVN

SEQ ID NO: 2607 - protein, 587 aa, unidentified
  REGION 1..587: note = Description of Unknown: uncultivated organism sequence
  REGION 1..587: note = Category: MG81 effectors
  REGION 1..587: note = Description: MG81-896 effector
MRKGNKPTDGLLWYPRRAVFDTSHQKRPCALRGGNGGHDAGWARSRWRTALTTGTGACYAPVSGGERTDSPTEVGRHPDAFEVTLPRLFAFGFGCGGFVLREAFMADHRKIYNTMVRAELKKLDRVKQLPEYRKNQKEIQALDWKNSADKQRLKELYGNQRKILQKQGFTEYGFKSDSKDYYKHFIENIGSSVATHGIAPQVWNAFDKMLFQKDGKVVHFKRYGDVHSLKGGSVAHKSGGAEIMFRKTYIEWKGLKLPLKLSPNNAYEAEMLSYRVKYVRILRTRGKTKDRWYAQLSLEGKPAVKYDSNTGKPVHPVGRGAVGLDIGPQTLAYAAANEENLVELADQVQNIEQEKRRLQRKLDRSRRATNPDNYNENGTIRRGVKLTHNKSKRYCKLQKELSWIQHCQAETRKRQHIALANHLLSLGDCFYVEPMAWPSLTHRAKKTEVSEKTGRIKRKKRFGKSVANKAPASLIGILKLKCISLGLTGVVEVPMLLRASQYNHQSKDYAKKSLSQRWNDMPDGNRIQRDLYSAFLLQHYNSQSESFDQETLERDYPQFVRLHNQTIQRLSALPKTPSSMGIRRSVS

SEQ ID NO: 2608 - protein, 1134 aa, unidentified
  REGION 1..1134: note = Description of Unknown: uncultivated organism sequence
  REGION 1..1134: note = Category: MG81 effectors
  REGION 1..1134: note = Description: MG81-897 effector
MKYVIGMDIGIGSIGWSVIRSDADCKRIEDFGVRIFEPGENASDRKSNSQIRREYRSVRRVLRRRKHRKELLKAHLENIGLTTIDRINEYFKHADGDIISLRVKGLDKKLAPEEIAACLINIANRRGYRPFYENEELSQYEKTSLNKTRQFMLSGEYRTSAEMILKNEQFDSEESEYRSYRNRSGNEETVLIERKWLRDEVEKILKKQSEFYPCLNDRNTNAIKRIIFDQRDFEDGPGDKNDPFRRYTGFLESMGQCRFYPDEKRGYRATLTADTYSLVNELSQYSYVDENGCFVFDSALAHDLIASALKNAKFTKSDFNKICKAHGIVPIYGGKGKDTDISRCFKFLKAIKPILEADGFDWETVCNIDTASDPDSILNRIGIIVSENITPARRKKALKNLNILNDDSITALCNYKFGGTSSVSYKYMSGAIEAFLNGDIYGKHQASHIEETATESVKHTKLPVFDKDFEFFKNPVVFRAINESRKVINAIIEKYGSPSAINIEVGSEVSRSFANRTADKNEQTKRMKEKDAAKKAIAELLGVDIASVTSKMIDRYFLGELQGWKCLYSGKEINKEECLRGSKAYEIDHIVPFSLILDNTLNNKALVLTSENQLKKQQTPLMYLSGERRKNFIGTVNELFRAKKIKKKKYAYLLQPDLNDEKMSEWKSRNLNDMRYISRFMVGYLKENLKFDNSSKSEGRWQNVYAVKGSLTSMFRKLWLNETTWGRADKASIKAETYLDHAVDAVVIGNCLPVYVEIAQVNLRLRDIYKSNGRQFVAEYWDCFNKGVEMISRYYNIDKDTVRAFLKKSDRIPSLIPDLREEVDRRFVDHAIYSKYQKEIADHEGKKFKEPTYEEAEQAYRVSMENLYPTDLQFAHSLSMPLISCKPERKYRGEITAANPVKLREIDGKLYTLSKKEIGKIERKDIEKIYTSDTQLIAYLIELFDGAKDTATLGDIMKEKGISEIRTKNGNAIRKLTLRNICNKDFLKKEIDENNHTYLDTAKYYCVELYKDIKNQLQVQGIKRADIILQNGKLCLAPWYKQPDDYFKHVMYLQKNDYLKVYKNGKLSFCGYYRSAAGLTNSRLYFIIDNQPEDKKKYITLKLEVKKYPVDILGKIGKKEIKCGEPLSSAKVKK

SEQ ID NO: 2609 - protein, 1138 aa, unidentified
  REGION 1..1138: note = Description of Unknown: uncultivated organism sequence
  REGION 1..1138: note = Category: MG81 effectors
  REGION 1..1138: note = Description: MG81-898 effector
MKYVIGMDIGIGSIGWSVIRSDADCKRIEDFGVRIFEPGENASDRKSNSQIRREYRSVRRVLRRRKHRKELLKAHLENIGLTTIDRINEYFKHADGDIISLRVKGLDKKLAPEEIAACLINIANRRGYRPFYENEELSQYEKTSLNKTRQFMLSGEYRTSAEMILKNEQFDSEESEYRSYRNRSGNEETVLIERKWLRDEVEKILKKQSEFYPCLNDRNTNAIKRIIFDQRDFEDGPGDKNDPFRRYTGFLESMGQCRFYPDEKRGYRATLTADTYSLVNELSQYSYVDENGCFVFDSALAHDLIASALKNAKFTKSDFNKICKAHGIVPIYGGKGKDTDISRCFKFLKAIKPILEADGFDWETVCNIDTASDPDSILNRIGIIVSENITPARRKKALKNLNILNDDSITALCNYKFGGTSSVSYKYMSGAIEAFLNGDIYGKHQASHIEETATESVKHTKLPVFDKDFEFFKNPVVFRAINESRKVINAIIEKYGSPSAINIEVGSEVSRSFANRTADKNEQTKRMKEKDAAKKAIAELLGVDIASVTSKMIDRYFLGELQGWKCMYSGKEINKEECLRGSKTYEIDHIVPFSLILDNTLNNKALVLTSENQLKKQQTPLMYLSGERRKNFIGTVNELFRAKKIKKKKYAYLLQPDLNDEKMSEWKSRNLNDMRYISRFMVGYLKENLKFDNSSKSEGRWQNVYAVKGSLTSMFRKLWLNETTWGRADKASIKAETYLDHAVDAVVIGNCLPVYVEIAQVNLRLRDIYKSNGRQFVAEYWDCFNKGVEMISRYYNIDKDTVRAFLKKSDRIPSLIPDLREEVDRRFVDHAIYSKYQKEVADHEGKDFKKPTYEEAEQAYRVSMENLYPTDLQFAHGLSMPLISCKPERKYRGKITADNPVKLREIDSKLYTLSKKEIGKIERKDIEKIYTSDTQLIAYLIELFDGAKDTATLGDIMKEKGISEIRTKNGNAIRKLTLRNICNKDFLKKEIDENNHTYLDTAKYYCVELYKDIKDKLRVQGIKRADIIPQNGKLCLAPWYKQPDGFFKHVMYLQKNDYLKVYENGELLFCGYYLSVEDIRNSKLYFIIDNQPGQNRKENCKSIHIKSEVKKYTVDILGKIGKKEIKCGEPLSSAKVKK

SEQ ID NO: 2610 - protein, 1136 aa, unidentified
  REGION 1..1136: note = Description of Unknown: uncultivated organism sequence
  REGION 1..1136: note = Category: MG81 effectors
  REGION 1..1136: note = Description: MG81-899 effector
MKYVIGMDIGIGSIGWSVIRSDADCKRIEDFGVRIFDPGENAGDRKRKSNSQIRREYRSVRRVLRRRKHRKELLKAHLENIGLTTIDRINEYFKHADGDIISLRVKGLDKKLAPEEIAACLINIANRRGYRPFYENEELSQYEKTSLNKTRQFMLSGEYRTSAEMILKNEQFDSEESEYRSYRNRSGNEETVLIERKWLRDEVEKILKKQSEFYPCLNDRNTNAIKRIIFDQRDFEDGPGDKNDPFRRYTGFLESMGQCRFYPDEKRGYRATLTADTYSLVNELSQYSYVDENGCFVFDSALAHDLIASALKNAKFTKSDFNKICKAHGIVPIYGGKGKDTDISRCFKFLKAIKPILKADGFDWETVCNIDTASDPDSILNRIGIIVSENITPARRKKALKNLNILNDDSITALCNYKFGGTSSVSYKYMSGAIEAFLNGDIYGKHQASHIEETATESIKHTKLPVFDKDFEFFKNPVVFRAINESRKVINAIIEKYGSPSAINIEVGSEVSRSFANRTADKNEQTKRMKEKDAAKKAIAELLGVDIASVTSKMIDRYFLGELQGWKCLYSGKEINKEECLGGSKAYEIDHIVPFSLILDNTLNNKALVLTSENQLKKQQTPLMYLSGERRKNFIGTVNELFRAKKINKKKYAYLLQPDLNDEKMSEWKSRNLNDMRYISRFMVGYLKENLKFDNSSKSEGRWQNVYAVKGSLTSMFRKLWLNETTWGRADKASIKAETYLDHAVDAVVIGNCLPVYVEIAQVNLRLRDIYKSNGRQFVAEYWDCFNKGVEMISRYYNIDKDTVRAFLKKSDRIPSLIPDLREEVDRRFVDHAIYSKYQKEIADHEGKKFKEPTYEEAEQAYRVSMENLYPTDLQFAHGLSVPLISCKPERKYRGEITAANPVKLREIDGKLYTLSRKEIGKIERKDIEKIYTSDTQLIAYLIELFDGAKDTATLGDIMKEKSISEIRTKNGNAIRKLTLRNICNKDFLKKEIDENNHTYLDTAKYYCVELYKDIKNQLQVQGIKRADIILQNGKLCLAPWYKQPDDYFKHVMYLQKNDYLKVCKNGKLSFCGYYRSAAGLTNSRLYFIIDNQPEDKKKYITLKLEVKKYSVDILGKIGKKEIKCGEPLSSAKVKK

SEQ ID NO: 2611 - protein, 495 aa, unidentified
  REGION 1..495: note = Description of Unknown: uncultivated organism sequence
  REGION 1..495: note = Category: MG81 effectors
  REGION 1..495: note = Description: MG81-900 effector
MPKEEKESCCVLQLRLYPEPWQVQIIETRFKVLEHLKNSLIALELRKLRNLEKTRAYREIQEQIKLADDKSKIKLYAKRRKLLKDAGFSEFVFKDDITPMQKHFAAHIATHVAHRAASEVWRAFDKFLFGNGKMVHYVRRGTLRSASNQTAGTTMTLENDYFKWKGGRDKNSIAINIRVAKPTTYYEKEMLQKKAKYFRIVRKWGKIGYKYYLQITLAGLPAVKPRLIANEKKVGIDIGPSSIAIVSDKKVELRALADKVQNNHIEKCSLQRSMDRSRRNLNPQNYNEDGTIRRGIRLNWTFSKHYIEMRGKVRMLERKNVDIRKYQHTCLANEVISLGTDVYIEQMSFKGLQRRAKETTYREDGRPKRKKRFGKSIANRAPAMFVEILGRKLTTIVGTELNKVDTFKFRASQYDHTNGSYKKKLLKERWAQLSNGDRIQRDLYSAFLLKNSNADLNSTNVEQCNATYDVFKIMHDDCITKLKSEKKSCLPSFGV

SEQ ID NO: 2612 - protein, 559 aa, unidentified
  REGION 1..559: note = Description of Unknown: uncultivated organism sequence
  REGION 1..559: note = Category: MG81 effectors
  REGION 1..559: note = Description: MG81-901 effector
MAKKISTDADTTLRAYKFRLDPTQAQASALAQCAGAARYAYNLLTAHNLDVSRARADYWHTRIDAGADETTVKAELKALAKSDAAYKSIGYAAYGTQHLTPEINRHRAASKAIESGADPAIVWPETERSSEPWMHTIPRRVLVSGLQSADKAWKNFFDSRTGVRAGRLVGTPRFKRKGVSRDSFTIPAPETIGAYGTAYLRGEPEYARRKAQLKRCGIKTTPTIEDYRHVRLSHLGVIRTHDTTRHLVKAVRAGAQVRSYTVSRAANRWYVSILVELTRPSASPTRAQRSAGAVGVDLGVRYLAALSDEQAPQRFAQYPSLEFTGDGAPTLANPRWARAAEKRLVRLQRALSRAQKGSNRRARIVQQIARHHHLVALRRESGLHQVSKRLSTGYTLIGLEDLAVAGMTASAAGTIEAPGKNVRQKAGLNRSILDAAFSTLRRQLEYKASWYGSQVQIIDRFFASSQMCSACGARAKTKLDLRVRVFECAACGVRIDRDVNAARNIRAEAVRMYEAQLAPGTGESLNGRGVTDSDAAGSVVLGDVALDASRPAASGGGSP

SEQ ID NO: 2613 - protein, 521 aa, unidentified
  REGION 1..521: note = Description of Unknown: uncultivated organism sequence
  REGION 1..521: note = Category: MG81 effectors
  REGION 1..521: note = Description: MG81-902 effector
MSTAAETSSAPQGTIERHVAFKFCLDPNQEQLVALGRDGGASRATYNMLVGYNTDVMKTRNKYWAKRREEGATDDEIKAELKTLTKEDPKFKALGYMAFAKNHLTPEIAHHRACAKAIEEGTPVEEVWGEGERSKEPWLHTVSRRVLVSGLMSADKALKNFFDSRTGKRAGGKMGAPKFKSRASNSDSFTIYAPDTMGGYGAPYLRGEPAYHDAKARMKRRGDKGTPTIGDYRHVRLAHLGTFRIHGNTRRMMRTIRKGGVIKSFTVSQVADRWYVSFLVEMTVPSPKSTRKQKKAGAVGVDLGVKYMAALSDTDAPKRFNPDSGVNFTDGTKPTIENPRWLKHAENRIAKLQQKIARQVKGSNRRTLNVRKLAKTHHIVALRRETGLHQLTKNLTTRYALIGIEDLNVAGMTASASGTVENPGKNVAQKAGLNRAVLDVAFGTFRSQLEYKSAWYGSAVQVIDRYYPSSQTCSNCGKRPDAKLTLNNRVYKCGHCHAVIDRDLNAAINIRREAERLHAEA

SEQ ID NO: 2614 - protein, 1134 aa, unidentified
  REGION 1..1134: note = Description of Unknown: uncultivated organism sequence
  REGION 1..1134: note = Category: MG81 effectors
  REGION 1..1134: note = Description: MG81-903 effector
MKYVIGMDIGIGSIGWSVIRSDADCKRIEDFGVRIFDPGENASDRKSNSQIRREYRSVRRVLRRRKHRKELLKAHLENIGLTTIDRINEYFKHADGDIISLRVKGLDKKLAPEEIAACLINIANRRGYRPFYENEELSQYEKTSLNKTRQFMLSGEYRTSAEMILKNEQFDSEESEYRSYRNRSGNEEIVLIERKWLRDEVEKILKKQSEFYPCLNDRNTNAIKRIIFDQRDFEDGPGDKNDPFRRYTGFLESMGQCRFYPDEKRGYRATLTADTYSLVNELSQYSYVDENGCFVFDSALAHDLIASALKNAKFTKSDFNKICKAHGIVPIYGGKGKDTDISRCFKFLKAIKPILEADGFDWETVCNIDTASDPDSILNRIGIIVSENITPARRKKALKNLNILNDDSITALCNYKFGGTSSVSYKYMSGAIEAFLNGDIYGKHQASHIEETATESVKHTKLPVFDKDFEFFKNPVVFRAINESRKVINAIIEKHGSPSAINIEVGSEVSRSFANRTADKNEQTKRMKEKDAAKKAIAELLGVDIASVTSKMIDRYFLGELQGWKCLYSGKEINKEECLRGSKAYEIDHIVPFSLILDNTLNNKALVLTSENQLKKQQTPLMYLSGEQRKNFIGTVNELFRAKKIKKKKYAYLLQPDLNDEKMSEWKSRNLNDMRHISRFMVGYLKENLKFDNFSKSEGRWQNVYAVKGSLTSMFRKLWLNETTWGRADKASIKAETYLDHAVDAVVIGNCLPVYVEIAQVNLRLRDIYKSNGRQFVAEYWDCFNKGVEMISRYYNIDKDTVRAFLKKSDRIPSLIPDLREEVDRRFVDHAIYSKYQKEIADHEGKKFKEPTYEEAEQAYRVSMENLYPTDLQFAHGLSMPLISCKPERKYRGEITAANPVKLREIDGKLYTLSKKEIGKIERKDIEKIYTSDTQLIAYLIELFDGAKDTATLGDIMKEKGISEIRTKNGNAIRKLTLRNICNKDFLKKEIDENNHTYLDTAKYYCVELYKDIKNQLQVQGIKRADIILQNGKLCLAPWYKQPDDYFKHVMYLQKNDYLKVYKNGKLSFCGYYRSAAGLTNSRLYFIIDNQPEDKKKYITLKLEVKKYPVDILGKIGKKEIKCGEPLSSAKVKK

SEQ ID NO: 2615 - protein, 537 aa, unidentified
  REGION 1..537: note = Description of Unknown: uncultivated organism sequence
  REGION 1..537: note = Category: MG81 effectors
  REGION 1..537: note = Description: MG81-904 effector
MISDEEYKKLLKQYHKLSDRHILVVETDMPYSDVLKVVILSDKIRKAGNELVSFMRKNYDQLIRTKKYRKLLKLYGSTKDKKKRKDLADQLNEMQKAYNVTWDYCRKSMIPIGKKYGIDAVFALTKAEDVWRGIEKCLYGNGKAIHFSKYGELPCIRAKQINRGIPISVKDDRLQFKLGKTAFGIQVNDRFQQDEADAVLTYLAESEIVDNKAVNTLMEDAYYIDTYRPCYATLVIKMIRGRYRIYLHLTIEGKAKPKYDKYGNLRHKYGKGMIGADIGTQTVAYTSDTEVGLKNLSERGNSIQTSERKERLLYRAMDRSRRAANPQNYNEDGTVKKGRKTWKYSNHYKKLKAKHSELCRINAVNRQLAINEDANHLRSLGDTFVTEPKNASKLMKRAKETAVNDKGRFNKKKRFGKSIKNRCPSGFQTTVEKKFKTTGGTYIEVPNNYRASQYDHTVDDYIKKKLSDRLYKLQDGTEVQRDWYSSFLLYCYDYKIQNIDKNKCITKFDNCYKKEKALITWIKAHKIKVLNSGIKIA

SEQ ID NO: 2616 - protein, 567 aa, unidentified
  REGION 1..567: note = Description of Unknown: uncultivated organism sequence
  REGION 1..567: note = Category: MG81 effectors
  REGION 1..567: note = Description: MG81-905 effector
MTKRKKHQITEYEKCLREYHKASPRHVIVLETDLTEDEKRHLFHQADLLRQCGNELLGIMKRHLDQLLRTKKYRGLRKSYGKISKSIKSLQQIKELSNVQKRHLKDQKKNLQTVSDQMNEMQEEYHITWEYCRNTMKTLRLKYEQTSVIALSRAEDIWAAVSKVLYSDGERLHFKKRGDLPELRAKQFHKEIIGRVKNGSLEFRYGKVSLPVIRKETDLWLMDELEAVESYLKDPSFHDAYAIDQMKHGEIVSTYRPCYASIVCKTIRGKLRVYLHLTVEGLPFPKRTKDGVIKHLCGDGIVGCDIGTQTIAYTSDHVVGLENLAERGNSIRCVERQQRLVQRAMDRSRRAMNPDNYNADGTIRKGKKTWIKSKRYQKLQLSYRELCRVSAENRKLAIHEQVHKMRSLGDVFVTEAKNAKKLQKRANPEDPLNKNGKPKRKKRFGRSIQNRCPGYFQAKIQQLFESTGGTYIEVPSDYRASQYDHTVDDYIKKKLSQRMFNLKDGTKVQRDWYSSFLLYCIDLITKTIDRQKCLATFETQLNKEHAMIEEIIRLKKRIMNSGIRVAA

SEQ ID NO: 2617 - protein, 606 aa, unidentified
  REGION 1..606: note = Description of Unknown: uncultivated organism sequence
  REGION 1..606: note = Category: MG81 effectors
  REGION 1..606: note = Description: MG81-906 effector
MKPDHIHVFVDVPQTAATCDVVGTFKDISAIELFKAFPQLIQSYAGCGILWSRGYFVSTVIKIILRSRKMITDKGHKRHLKQFHKFSDRHILAIETDMPYSDIQKVVKLSNKIRKAGNELVGLMRKNYNQLMRTKRYRKLLFLYGDSKDKDKRRTYAKQLNEMQKAYNITWEYCRTSMIPIGKKYGVDAVFALTKAEDIWRGIEKCLYGNGNAIHFSRYGEMPCIRAKQINRGIPIFVRDNKLQFKLGRMVFGIQINDRFQQDEVDAVLSYLAESEILDDRAVSILIKDGYCIDTYRPCYATLVPRMIRGKYRVYLHLTIEGKAKQKYDKHGNPRHKYGKGMIGADIGTQTVAYTSDTEVGLKNLSERGNSIQTSERKERLLYRAMDRSRRATNPQNYNDDGTVKKSRKTWKYSNRYKKLKEKHSELCRINAINRQLAINEDANHLRSLGDVFITEPKNAGRLMRRAKETTVNSKGKFNRKKRFGRSIKNRCPSGFQAAVEQKFKVSGGTYIEVSNDYRASQYDHTVDDYIKKRLSDRMYKLQDGTEVQRDWYSSFLLHCYDYRTKDIDKNKCISEFDKCYSKEKALIEWIKANEIKVLNSGIKIA

SEQ ID NO: 2618 - protein, 519 aa, unidentified
  REGION 1..519: note = Description of Unknown: uncultivated organism sequence
  REGION 1..519: note = Category: MG81 effectors
  REGION 1..519: note = Description: MG81-907 effector
MIQPELKAYRRCSDRHVLVLETNLTYVEKCQFFHYADLIRKAGNELTGIMKKRYDQLVRTKRYRKLKSLYKKYKDADNKKALKDVCDQMKKMQKQYDVTWDYCRTSMIPIGKKYGIDAVFALTKAEDVFRGIEKCLYSDGETIHFKKRGDLPCIRAKQLNRGIIMKQMNFKFKNIEFGAKIKDRYEQEEVDAILYYLKNTELMDSIAANTYKETNICVSTYRPCYVSLVCKKIRGKLRVYVHITIEGLSKPKQDRFGNFKHNKGKGVVGCDIGTQTIAYTTETKAGLKNLAERGSCIEVNERKERRIYRAMDRSRRAMNPDNYNEDGTIKKGKKTWVLSNRYKKLRTKHTELCRINATNRHLAINEDVNELRSLGDVFVTEPKNAKKLQKKAKTGKRKKRFGRSIKNRCPGYFQSQAKRKFRIYVEVPNDYKASQYDHTSDEYVKKSLSQRMYKLQDGTMVQRDLYSSFLLYCIDLNTNKIDKNKCIHEFEKQYKNQNETIEYIQMNQIKVMNSGIRVN

SEQ ID NO: 2619 - protein, 1140 aa, unidentified
  REGION 1..1140: note = Description of Unknown: uncultivated organism sequence
  REGION 1..1140: note = Category: MG81 effectors
  REGION 1..1140: note = Description: MG81-908 effector
MKYVIGMDIGIGSIGWSVIRSDADCKRIEDFGVRIFEPGENASDRKSNSQIRREYRSVRRVLRRRKHRKELLKAHLENIGLTTIDRINEYFKHADGDIISLRVKGLDKKLAPEEIAACLINIANRRGYRPFYENEELSQYEKTSLNKTRQFMLSGEYRTSAEMILKNEQFDSEESEYRSYRNRSGNEETVLIERKWLRDEVEKILKKQSEFYPCLNDRNTNAIKRIIFDQRDFEDGPGDKNDPFRRYTGFLESMGQCRFYPDEKRGYRATLTADTYSLVNELSQYSYVDENGCFVFDSALAHDLIASALKNAKFTKSDFNKICKAHGIVPIYGGKGKDTDISRCFKFLKAIKPILEADGFDWETVCNIDTASDPDSILNRIGIIVSENITPARRKKALKNLNILNDDSITALCNYKFGGTSSVSYKYMSGAIEAFLNGDIYGKHQASHIEETATESVKHTKLPVFDKDFEFFKNPVVFRAINESRKVINAIIEKYGSPSAINIEVGSEVSRSFANRTADKNEQTKRMKEKDAAKKAIAELLGVDIASVTSKMIDRYFLGELQGWKCMYSGKEINKEECLRGSKTYEIDHIVPFSLILDNTLNNKALVLTSENQLKKQQTPLMYLSGERRKNFIGTVNELFRAKKIKKKKYAYLLQPDLNDEKMSEWKSRNLNDMRYISRFMVGYLKENLKFDNSSKSEGRWQNVYAVKGSLTSMFRKLWLNETTWGRADKASIKAETYLDHAVDAVVIGNCLPVYVEIAQVNLRLRDIYKSNGRQFVAEYWDCFNKGVEMISRYYNIDKDTVRAFLKKSDRIPSLIPDLREEVDRRFVDHAIYSKYQKEIADHEGKKFKEPTYEEAEQAYRTSMENLYPTDLQFAHSLSMPLISCKPERKFSGKITADNPVKLREIDGKLYTLSKKRIYSAADKDKIKRTDIEKIYTSDANLIAYLIELFDGAKDTATLRDIMKENGISEIRTKNGNAIRKLTLRNICDKDFLKKEIDENNHTYLDTAKYYCVELYKDIKDKLRVQGIKRADIIPQNGKLCLAPWYKQPDNYFKHVMYLQKNDYLKVYKNGKLSFCGYYRSAAGLTNSKVHFIIDNQPEDKEKYITLKLEVKKYPVDILGKIGKKEIKCGEPLSSAKVKK

SEQ ID NO: 2620 - protein, 1134 aa, unidentified
  REGION 1..1134: note = Description of Unknown: uncultivated organism sequence
  REGION 1..1134: note = Category: MG81 effectors
  REGION 1..1134: note = Description: MG81-909 effector
MKYVIGMDIGIGSIGWSVIRSDADCKRIEDFGVRIFDPGENASDRKSNSQIRREYRSVRRVLRRRKHRKELLKAHLENIGLTTIDRINEYFKHADGDIISLRVKGLDKKLAPEEIAACLINIANRRGYRPFYENEELSQYEKTSLNKTRQFMLSGEYRTSAEMILKNEQFDSEESEYRSYRNRSGNEETVLIERKWLRDEVEKILKKQSEFYPCLNDRNTNAIKRIIFDQRDFEDGPGDKNDPFRRYTGFLESMGQCRFYPDEKRGYRATLTADTYSLVNELSQYSYVDENGCFVFDSALAHDLIASALKNAKFTKSDFNKICKAHGIVPIYGGKGKDTDISRCFKFLKAIKPILEADGFDWETVCNIDTASDPDSILNRIGIIVSENITPARRKKALKNLNILNDDSITALCNYKFGGTSSVSYKYMSGAIEAFLNGDIYGKHQASHIEETATESVKHTKLPVFDKDFEFFKNPVVFRAINESRKVINAIIEKYGSPSAINIEVGSEVSRSFANRTADKNEQTKRMKEKDAAKKAIAELLGVDIASVTSKMIDRYFLGELQGWKCMYSGKEINKEECLRGSKAYEIDHIVPFSLILDNTLNNKALVLTSENQLKKQQTPLMYLSGERRKNFIGTVNELFRAKKIKKKKYAYLLQPDLNDEKMSEWKSRNLNDMRHISRFMVGYLKENLKFDNSSKSEGRWQNVYAVKGSLTSMFRKLWLNETTWGRADKASIKAETYLDHAVDAVVIGNCLPVYVEIAQINLRLRDIYKSNGRQFVAEYWDCFNKGVEMISCYYNIDKDTVRAFLKKSDRIPSLIPDLREEVDRRFVDHAIYSKYQKEIADHEGKKFKEPTYEEAEQAYRVSMENLYPTDLQFAHSLSMPLISCKPERKYRGEITAANPVKLREIDGKLYTLSKKEIGKIERKDIEKIYTSDTQLIAYLIELFDGAKDTATLGDIMKEKGISEIRTKNGNAIRKLTLRNICNKDFLKKEIDENNHTYLDTAKYYCVELYKDIKNQLQVQGIKRADIILQNGKLCLAPWYKQPDDYFKHVMYLQKNDYLKVYKNGKLSFCGYYRSAAGLTNSRLYFIIDNQPEDKKKYITLKLEVKKYPVDILGKIGKKEIKCGEPLSSAKVKK

SEQ ID NO: 2621 - protein, 1134 aa, unidentified
  REGION 1..1134: note = Description of Unknown: uncultivated organism sequence
  REGION 1..1134: note = Category: MG81 effectors
  REGION 1..1134: note = Description: MG81-910 effector
MKYVIGMDIGIGSIGWSVIRSDADCKRIEDFGVRIFDPGENASDRKSNSQIRREYRSVRRVLRRRKHRKELLKAHLENIGLTTIDRINEYFKHADGDIISLRVKGLDKKLAPEEIAACLINIANRRGYRPFYENEELSQYEKTSLNKTRQFMLSGEYRTSAEMILKNEQFDSEESEYRSYRNRSGNEEIVLIERKWLRDEVEKILKKQSEFYPCLNDRNTNAIKRIIFDQRDFEDGPGDKNDPFRRYTGFLESMGQCRFYPDEKRGYRATLTADTYSLVNELSQYSYVDENGCFVFDSALAHDLIASALKNAKFTKSDFNKICKAHGIVPIYGGKGKDTDISRCFKFLKAIKPILEADGFDWETVCNIDTASDPDSILNRIGIIVSENITPARRKKALKNLNILNDDSITALCNYKFGGTSSVSYKYMSGAIEAFLNGDIYGKHQASHIEETATESVKHTKLPVFDKDFEFFKNPVVFRAINESRKVINAIIEKYGSPSAINIEVGSEVSRSFANRTADKNEQTKRMKEKDAAKKAIAELLGVDIASVTSKMIDRYFLGELQGWKCMYSGKEINKEECLRGSKAYEIDHIVPFSLILDNTLNNKALVLTSENQLKKQQTPLMYLSGERRKNFIGTVNELFRAKKIKKKKYAYLLQPDLNDEKMSEWKSRNLNDMRHISRFMVGYLKENLKFDNSSKSEGRWQNVYAVKGSLTSMFRKLWLNETTWGRADKASIKAETYLDHAVDAVVIGNCLPVYVEIAQINLRLRDIYKSNGRQFVAEYWDCFNKGVEMISCYYNIDKDTVRAFLKKSDRIPSLIPDLREEVDRRFVDHAIYSKYQKEIADHEGKKFKEPTYEEAEQAYRVSMENLYPTDLQFAHSLSMPLISCKPERKYRGEITAANPVKLREIDGKLYTLSKKEIGKIERKDIEKIYTSDTQLIAYLIELFDGAKDTATLGDIMKEKGISEIRTKNGNAIRKLTLRNICNKDFLKKEIDENNHTYLDTAKYYCVDLYKDIKNQLQVQGIKRADIILQNGKLCLAPWYKQPDDYFKHVMYLQKNDYLKVYKNGKLSFCGYYRSAAGLTNSRLYFIIDNQPEDKKKYITLKLEVKKYPVDILGKIGKKEIKCGEPLSSAKVKK

SEQ ID NO: 2622 - protein, 1134 aa, unidentified
  REGION 1..1134: note = Description of Unknown: uncultivated organism sequence
  REGION 1..1134: note = Category: MG81 effectors
  REGION 1..1134: note = Description: MG81-911 effector
MKYVIGMDIGIGSIGWSVIRSDADCKRIEDFGVRIFDPGENASDRKSNSQIRREYRSVRRVLRRRKHRKELLKAHLENIGLTTIDRINEYFKHADGDIISLRVKGLDKKLAPEEIAACLINIANRRGYRPFYENEELSQYEKTSLNKTRQFMLSGEYRTSAEMILKNEQFDSEESEYRSYRNRSGNEETVLIERKWLRDEVEKILKKQSEFYPCLNDRNTNAIKRIIFDQRDFEDGPGDKNDPFRRYTGFLESMGQCRFYPDEKRGYRATLTADTYSLVNELSQYSYVDENGCFVFDSALAHDLIASALKNAKFTKSDFNKICKAHGIVPIYGGKGKDTDISRCFKFLKTIKPILEADGFDWETVCNIDTASDPDSILNRIGIIVSENITPARRKKALKNLNILNDDSITALCNYKFGGTSSVSYKYMSGAIEAFLNGDIYGKHQASHIEETATESVKHTKLPVFDKDFEFFKNPVVFRAINESRKVINAIIEKYGSPSAINIEVGSEVSRSFANRTADKNEQTKRMKEKDAAKKAIAELLGVDIASVTSKMIDRYFLGELQGWKCLYSGKEINKEECLGGSKAYEIDHIVPFSLILDNTLNNKALVLTSENQLKKQRTPLMYLSGERRKNFIGTVNELFRAKKIKKKKYAYLLQPDLNDEKMSEWKSRNLNDMRYISRFMVGYLKENLKFDNSSKSEGRWQNVYAVKGSLTSMFRKLWLNETTWGRADKASIKAETYLDHAVDAVVIGNCLPVYVEIAQVNLRLRDIYKSNGRQFVAEYWDCFNKGVEMISRYYNIDKDTVRAFLKKSDRIPSLIPDLREEVDRRFVDHAIYSKYQKEIADHEGKDFEKPTYEEAEQAYRVSMENLYPTDLQFAHGLSMPLISCKPERKYRGEITAANPVKLREIDGKLYTLSKKEIGKIERKDIEKIYTSDTQLIAYLIELFDGAKDTATLGDIMKEKGISEIRTKNGNAIRKLTLRNICNKDFLKKEIDENNHTYLDTAKYYCVELYKDIKNQLQVQGIKRADIILQNGKLCLAPWYKQPDDYFKHVMYLQKNDYLKVYKNGKLSFCGYYRSAAGLTNSRLYFIIDNQPEDKKKYITLKLEVKKYSVDILGKIGKKEIKCGEPLSSAKVKK

SEQ ID NO: 2623 - protein, 991 aa, unidentified
  REGION 1..991: note = Description of Unknown: uncultivated organism sequence
  REGION 1..991: note = Category: MG81 effectors
  REGION 1..991: note = Description: MG81-912 effector
MKYVIGMDIGIGSIGWSVIRSDADCKRIEDFGVRIFDPGENASDRKSNSQIRREYRSVRRVLRRRKHRKELLKAHLENIGLTTIDRINEYFKHADGDIISLRVKGLDKKLAPEEIAACLINIANRRGYRPFYENEELSQYEKTSLNKTRQFMLSGEYRTSAEMILKNEQFDSEESEYRSYRNRSGNEEIVLIERKWLRDEVEKILKKQSEFYPCLNDRNTNAIKRIIFDQRDFEDGPGDKNDPFRRYTGFLESMGQCRFYPDEKRGYRATLTADTYSLVNELSQYSYVDENGCFVFDSALAHDLIASALKNAKFTKSDFNKICKAHGIVPIYGGKGKDTDISRCFKFLKAIKPILEADGFDWETVCNIDTASDPDSILNRIGIIVSENITPARRKKALKNLNILNDDSITALCNYKFGGTSSVSYKYMSGAIEAFLNGDIYGKHQASHIEETATESVKHTKLPVFDKDFEFFKNPVVFRAINESRKVINAIIEKYGSPSAINIEVGSEVSRSFANRTADKNEQIKRMKEKDAAKKTIAELLGVDIASVTSKMIDRYFLGELQGWKCLYSGKEINKEECLGGSKAYEIDHIVPFSLILDNTLNNKALVLTSENQLKKQRTPLMYLSGEQRKNFIGTVNELFRAKKIKKKKYAYLLQPDLNDEKMSEWKSRNLNDMRYISRFMVGYLKENLKFDNSSKLEGRWQNVYAVKGSLTSMFRKLWLNETTWGRADKASIKAETYLDHAVDAVVIGNCLPVYVEIAQVNLRLRDIYKSNGRQFVAEYWDCFNKGVEMISRYYNIDKDTVRAFLKKSDRIPSLIPDLREEVDRRFVDHAIYSKYQKEIADHEGKKFKEPTYEEAEQAYRVSMENLYPTDLQFAHGLSMPLISCKPERKYRGEITAANPVKLREIDGKLYTLSRKEIGKIERKDIEKIYTSDTQLIAYLIELFDGAKDTATLGDIMKEKKHLGNTNQERQRHSQTHFEKYMQQGFLKKRN

SEQ ID NO: 2624 - protein, 1312 aa, unidentified
  REGION 1..1312: note = Description of Unknown: uncultivated organism sequence
  REGION 1..1312: note = Category: MG81 effectors
  REGION 1..1312: note = Description: MG81-913 effector
MKISKVNHVRTGTTVTQMQGEGIIYVNPSQNKNAKKDLTEHIKKLNEKAKVLYSPINPVNSITVSMDKNEKQDVNASAKAIKYLVNGILRKNENGIPDCDSLLSQIREKAREAHTSSINPDKLAEKIVDRCLRKKLCKKSEIAKALFAAILSSNKAERLNLLDKDEVKAFFDLAHEDYYKTEQLKEIEDSIVKKDVRVQVKEGMDGEKHLVLSSADNPKKHFYFDFIKEYTSKDNAGREEMLIRFRQLIILFYSGVKAYHLSIGSDVGAWTFGSSLPDVADNFNDEAAALITECQIQQAEKEKYGKKKNILSDKLKNCKYGTPEYRNLLGQETDCKTAIASCNSAIGNAQKKIKVLLADTICNNYRTAVKTEGLAEGDIFWIGYIQGIAEKLFEKKSSYTMYKMSTKYLYEVTFNEWLSFVALKVIDMGKAVYHFAMPDCSDICSGAEIRAGKVQPLFEDGITSFDYERIKAKETITREFAVHATYAAGIFSNAVADKEYRLHTETDEKGRTLNFEDPLQYKEKEWVQALVPDAKKKLLMFFGGQSGWDGTEIAAKSDLEVTSAFQEMINVIRNSNYHYAGSIVSPKEETITIMRGLFDKEFSELGRILREKYYSNNVPVYYGIGDIDKLMTFLYTGESKREAQIPSFGNIFKKKDIPDFVKKNIAGSLLAKYNVQELEKFRSALYFVLKEIYYYGFLKETNIKDRFLAFLNKSKNSAKNPDAYNSFQSRLKDLDADCSFGEICQMYMTDYNQQNQGNYKVKSQTQEEKDRKDDKGHKYEHFKMLLYVTIQGAFTDYLAEKKEIFSFLMAPDLKENFFGSNAAKGFISSWKADLFNETKKVLSEDAYVLSWYALAHLLSPKQLNHLQGDIKSYIQFVGEINAREKSVLGRERDTRLTDTTGDFEKILKVLEFVMNFVGKTSNVLTDYFADADDYAKHLYSYVSYAGKKEEKNNAALAAFCQKAITQKDITLTDKIGIYHDGINPIVNTNVVKAMMYGNETILSEAVSKVSGDLFHGDIVSYFRLKKELEKVFEKGECANREEQTKLREFQNLKNRVELYDIAVFTDIINDYMGELVNMAYLRERDLMYYQLGYHYLRQEYATVEEKYKTISEENICITSGALLYQIMAMYSYNLPIIYKGKEGTYKYSNGGKINKFVKNYCGENLEDYDNVYYSGLELFEQRSRHDELHQFRNDIDHLKYFISADKSILDMYSQVYNGFFSYDIKLKKSVSYIFTNILAKYFVTADIKLNAKQVDGKRAVKLSVSEMSSDSFSYKEKVKMRDGKERERAYYLPVRSEGFLKDTKKLVEYISK

SEQ ID NO: 2625 - protein, 537 aa, unidentified
  REGION 1..537: note = Description of Unknown: uncultivated organism sequence
  REGION 1..537: note = Category: MG81 effectors
  REGION 1..537: note = Description: MG81-914 effector
MISDKEYKKLLKQFHKLSDRHILVVETDMPSSDVQKVVILSDKIRKAGNELVGLMRKNYDQLMRTKKYRKLLKLYGSTNDKKKHRDLANQLNEMQKQYNVTWDHCRNAMIHIGKKYSIDAVFALTKAEDIWRGIEKCLYNNGKTIHFSKYGELPCIRAKQINRGISMSVKDNELKFKLKGNVFGIQVKDRFQTDEVCAVLEYLSRSEIINDKAINKFLDKAYCIDTYRPCYATLVPKFIRGKYRVYLHLTIEGKAKPKYDRFGNPRHKFGKGIIGADIGTQTVAYTSNTEVGLKNLSERGNSIQTSERRERLLYRAMDRSRRATDPQNYNDDGTVKKGRKTWKYSNHYKKLKAKHSELCRINAINRQLAINEDANHLRSLGDVFITEPKNASKLMKRTKDTTVNSKGKFHKKKRFGKSIKNRCPSGFQTTVERKFKVSGGIYIEVPNNYRASQYDHTADDYIKKKLSDRIYKLTDGTLVQRDWYSSFLLYCYDYRTKDIDKNKCISEFDKCYNKEKALIEWIKANKIKILNSGIKIS

SEQ ID NO: 2626 - protein, 1134 aa, unidentified
  REGION 1..1134: note = Description of Unknown: uncultivated organism sequence
  REGION 1..1134: note = Category: MG81 effectors
  REGION 1..1134: note = Description: MG81-915 effector
MKYVIGMDIGIGSIGWSVIRSDADCKRIEDFGVRIFEPGENASDRKSNSQIRREYRSVRRVLRRRKHRKELLKAHLENICLTTIDRINEYFKHADGDIISLRVKGLDKKLAPEEIAACLINIANRRGYRPFYENEELSQYEKTSLNKTRQFMLSGEYRTSAEMILKNEQFDSEESEYRSYRNRSGNEETVLIERKWLRDEVEKILKKQSEFYPCLNDRNTNAIKRIIFDQRDFEDGPGDKNDPFRRYTGFLESMGQCRFYPDEKRGYRATLTADTYSLVNELSQYSYVDENGCFVFDSALAHDLIASALKNAKFTKSDFNKICKAHGIVPIYGGKGKDTDISRCFKFLKAIKPILEADGFDWETVCNIDTASDPDSILNRIGIIVSENITPARRKKALKNLNILNDDSITALCNYKFGGTSSVSYKYMSGAIEAFLNGDIYGKHQASHIEETATESVKHTKLPVFDKDFEFFKNPVVFRAINESRKVINAIIEKYGSPSAINIEVGSEVSRSFANRTADKSEQTKRMKEKDAAKKAIAELLGVDIASVTSKMIDRYFLGELQGWKCLYSGKEINKEECLRGSKAYEIDHIVPFSLILDNTLNNKALVLTSENQLKKQRTPLMYLSGEQRKNFIGTVNELFRAKKIKKKKYAYLLQPDLNDEKMSEWKSRNLNDMRHISRFMVGYLKENLKFDNSSKSEGRWQNVYAVKGSLTSMFRKLWLNETTWGRADKASIKAETYLDHAVDAVVIGNCLPVYVEIAQVNLRLRDIYKSNGRQFVAEYWDCFNKGVEMISRYYNIDKDTVRAFLKKSDRIPSLIPDLREEVDRRFVDHAIYSKYQKEIADHEGKKFKEPTYEEAEQAYRTSMENLYPTDLQFAHGLSMPLISCKPERKYRGEITAANPVKLREIDGKLYTLSKKEIGKIERKDIEKIYTSDTQLIAYLIELFDGAKDTATLGDIMKEKGISEIRTKNGNAIRKLTLRNICNKDFLKKEIDENNHTYLDTAKYYCVELYKDIKNQLQVQGIKRADIILQNGKLCLAPWYKQPDDYFKHVMYLQKNDYLKVYKNGKLSFCGYYRSAAGLTNSRLYFIIDNQPEDKKKYITLKLEVKKYPVDILGKIGKKEIKCGEPLSSAKVKK

SEQ ID NO: 2627 - protein, 1289 aa, unidentified
  REGION 1..1289: note = Description of Unknown: uncultivated organism sequence
  REGION 1..1289: note = Category: MG81 effectors
  REGION 1..1289: note = Description: MG81-916 effector
MKISKVDHVKTGVSERPIEAGGMMYSYPDSKNDNIVLREHIKKLTNRTKNLYLAFVAPKTNGGKLSMAAECSGTFNFYIKNNILCPIDNRKSDEEILNGILNAGFMARAIRDGRNERNVSENDVNNTVNRCLRQSLRKKYFSGSDGIYIPDVMKKLCMAIYGKANYKSIISSIPENELKLLIAAIRADYTRENYIEKIANSIEKQNVPIQVSEDGRRIILSSAYNEKKSYIFDFLKKYASCDKAGQEEMLKNMRYLIVLFFFGREVAEDALNDTGFCAWSFGLTLKEYGEKVFSKEVYDLWNARENIPFSQKADIRNLGDRLKLEYSKALVEHYQGALSSDDLSDSDKKWIGYISDKAGKMFSDHNMSSYKFTCGYLCERTWEEWISFVAMKFVEIGKGAYNFTMSAMDEIAKGGPVSFGTVDERYKNGISSFDYERMAAKDHLSRNLATYVSFALNNLDSSARSLDVREKAEDILSSSNLELLTNAKTKVLRYFGGESSFENMPVKDMSAEDIVSDLVSYFKVTRNSCFHFVSGASEGVNSDLFRAVFDKECQNAGVILRKRFYSNNVAMFYSEKDISALMTEMYDSVRNNPAQIPSFNKVISRNEVRNFITQLIPVGNRAPLNNAETSELFKNSIYFVLKEIYYHDFLNEKNLMKRFWDEIDSLKAADEKEEKAHEAFAARVKTITSENDDFGLLCQEIMTEYNQQNNQKSKKASAKKDKETGEIKKIENNDVIYKHYVMLLYLGIRQAFYKFIEEKECYAFLKKPSIGKQPEEKDFIYGWSTDMHNGMDVSDPLIQSWYITSHFINQKQLNHLIGQFKNYITYLDSIENRAEQTGNRIRESSKDQLDLYMKLLAVLDFAKLNNSLVSNTLEDYFDDADEYAKYISGFIDFGGDTKEALQAFCNQKFKCGDATETLGKYYDGLNPIMERNIILASMFGNTAIASNVIDRVTEKEVKDFYKRKNKVADLLSRGVSSEDDLKAIRFYQNLKNRIELVDMLSITELTNELVSHLTGYAYLRERDLMYMQLGYHYVKLFYTDVVDMSNKFRVLNGDCNITDGAALYQIAAMYSYDLPLYVIDDEGRSIKPNKLQSIGSKVKVFAKEYCKDDYDVYKEGLNLFEDISGPKDGRHDEFIDIRKYIDHMKYFANQKKSILDMYSEMYGGFFSYNTKLKKSVSYVLPNILMADFIVARLGFEKGIKTVGEKEVSVPQMVVKEISTDYLTFKEIKSILANQGNEILKDPNKIVIGSGWKEEPSQNNKGRKSEGTFVAARSTKYCEAVGRLLVYKKE

SEQ ID NO: 2628 - protein, 1134 aa, unidentified
  REGION 1..1134: note = Description of Unknown: uncultivated organism sequence
  REGION 1..1134: note = Category: MG81 effectors
  REGION 1..1134: note = Description: MG81-917 effector
MKYVIGMDIGIGSIGWSVIRSDADCKRIEDFGVRIFEPGENASDRKSNSQIRREYRSVRRVLRRRKHRKELLKAHLENIGLTTIDRINEYFKHADGDIISLRVKGLDKKLAPEEIAACLINIANRRGYRPFYENEELSQYEKTSLNKTRQFMLSGEYRTSAEMILKNEQFDSEESEYRSYRNRSGNEETVLIERKWLRDEVEKILKKQSEFYPCLNDRNTNAIKRIIFDQRDFEDGPGDKNDPFRRYTGFLESMGQCRFYPDEKRGYRATLTADTYSLVNELSQYSYVDENGCFVFDSALAHDLIASALKNAKFTKSDFNKICKAHGIVPIYGGKGKDTDISRCFKFLKAIKPILEADGFDWETVCNIDTASDPDSILNRIGIIVSENITPARRKKALKNLNILNDDSITALCNYKFGGTSSVSYKYMSGAIEAFLNGDIYGKHQASHIEETATESVKHTKLPVFDKDFEFFKNPVVFRAINESRKVINAIIEKYGSPSAINIEVGSEVSRSFANRTADKNEQTKRMKEKDAAKKAIAELLGVDIASVTSKMIDRYFLGELQGWKCMYSGKEINKEECLRGSKTYEIDHIVPFSLILDNTLNNKALVLTSENQLKKQQTPLMYLSGERRKNFIGTVNELFRAKKIKKKKYAYLLQPDLNDEKMSEWKSRNLNDMRYISRFMVGYLKENLKFDNSSKSEGRWQNVYAVKGSLTSMFRKLWLNETTWGRADKASIKAETYLDHAVDAVVIGNCLPVYVEIAQVNLRLRDIYKSNGRQFVAEYWDCFNKGVEMISRYYNIDKDTVRAFLKKSDRIPSLIPDLREEVDRRFVDHAIYSKYQKEIADHEGKKFKEPTYEEAEQAYRVSMENLYPTDLQFAHGLSMPLISCKPERKYRGEITAANPVKLREIDGKLYTLSRKEIGKIERKDIEKIYTSDTQLIAYLIELFDGAKDTATLGDIMKEKSISEIRTKNGNAIRKLTLRNICNKDFLKKEIDENNHTYLDTAKYYCVELYKDIKNQLQVQGIKRADIILQNGKLCLAPWYKQPDDYFKHVMYLQKNDYLKVYKNGKLSFCGYYRSAAGLTNSRLYFIIDNQPEDKKKYITLKLEVKKYSVDILGKIGKKEIKCGEPLSSAKVKK

SEQ ID NO: 2629 - protein, 1138 aa, unidentified
  REGION 1..1138: note = Description of Unknown: uncultivated organism sequence
  REGION 1..1138: note = Category: MG81 effectors
  REGION 1..1138: note = Description: MG81-918 effector
MKYVIGMDIGIGSIGWSVIRSDADCKRIEDFGVRIFEPGENASDRKSNSQIRREYRSVRRVLRRRKHRKELLKAHLENIGLTTIDRINEYFKHADGDIISLRVKGLDKKLAPEEIAACLINIANRRGYRPFYENEELSQYEKTSLNKTRQFMLSGEYRTSAEMILKNEQFDSEESEYRSYRNRSGNEETVLIERKWLRDEVEKILKKQSEFYPCLNDRNTNAIKRIIFDQRDFEDGPGDKNDPFRRYTGFLESMGQCRFYPDEKRGYRATLTADTYSLVNELSQYSYVDENGCFVFDSALAHDLIASALKNAKFTKSDFNKICKAHGIVPIYGGKGKDTDISRCFKFLKAIKPILEADGFDWETVCNIDTASDPDSILNRIGIIVSENITPARRKKALKNLNILNDDSITALCNYKFGGTSSVSYKYMSGAIEAFLNGDIYGKHQASHIEETATESVKHTKLPVFDKDFEFFKNLVVFRAINESRKVINAIIEKYGSPSAINIEVGSEVSRSFANRTADKNEQTKRMKEKDAAKKAIAELLGVDIASVTSKMIDRYFLGELQGWKCMYSGKEINKEECLRGSKTYEIDHIVPFSLILDNTLNNKALVLTSENQLKKQQTPLMYLSGERRKNFIGTVNELFRAKKIKKKKYAYLLQPDLNDEKMSEWKSRNLNDMRYISRFMVGYLKENLKFDNSSKSEGRWQNVYAVKGSLTSMFRKLWLNETTWGRADKASIKAETYLDHAVDAVVIGNCLPVYVEIAQVNLRLRDIYKSNGRQFVAEYWDCFNKGVEMISRYYNIDKDTVRAFLKKSDRIPSLIPDLREEVDRRFVDHAIYSKYQKEVADHEGKDFKKPTYEEAEQAYRVSMENLYPTDLQFAHGLSMPLISCKPERKYRGKITADNPVKLREIDSKLYTLSKKEIGKIERKDIEKIYTSDTQLIAYLIELFDGAKDTATLGDIMKEKGISEIRTKNGNAIRKLTLRNICNKDFLKKEIDENNHTYLDTAKYYCVELYKDIKDKLRVQGIKRADIIPQNGKLCLAPWYKQPDGFFKHVMYLQKNDYLKVYENGELLFCGYYLSVEDIRNSKLYFIIDNQPGQNRKENCKSIHIKSEVKKYTVDILGKIGKKEIKCGEPLSSAKVKK

SEQ ID NO: 2630 - protein, 1134 aa, unidentified
  REGION 1..1134: note = Description of Unknown: uncultivated organism sequence
  REGION 1..1134: note = Category: MG81 effectors
  REGION 1..1134: note = Description: MG81-919 effector
MKYVIGMDIGIGSIGWSVIRSDADCKRIEDFGVRIFDPGENASDRKSNSQIRREYRSVRRVLRRRKHRKELLKAHLENIGLTTIDRINEYFKHADGDIISLRVKGLDKKLAPEEIAACLINIANRRGYRPFYENEELSQYEKTSLNKTRQFMLSGEYRTSAEMILKNEQFDSEESEYRSYRNRSGNEEIVLIERKWLRDEVEKILKKQSEFYPCLNDRNTNAIKRIIFDQRDFEDGPGDKNDPFRRYTGFLESMGQCRFYPDEKRGYRATLTADTYSLVNELSQYSYVDENGCFVFDSALAHDLIASALKNAKFTKSDFNKICKAHGIVPIYGGKGKDTDISRCFKFLKAIKPILEADGFDWETVCNIDTASDPDSILNRIGIIVSENITPARRKKALKNLNILNDDSITALCNYKFGGTSSVSYKYMSGAIEAFLNGDIYGKHQASHIEETATESVKHTKLPVFDKDFEFFKNPVVFRAINESRKVINAIIEKYGSPSAINIEVGSEVSRSFANRTADKNEQTKRMKEKDAAKKAIAELLGVDIASVTSKMIDRYFLGELQGWKCMYSGKEINKEECLRGSKTYEIDHIVPFSLILDNTLNNKALVLTSENQLKKQQTPLMYLSGERRKNFIGTVNELFRAKKIKKKKYAYLLQPDLNDEKMSEWKSRNLNDMRHISRFMVGYLKENLKFDNSSKSEGRWQNVYAVKGSLTSMFRKLWLNETTWGRADKASIKAETYLDHAVDAVVIGNCLPVYVEIAQVNLRLRDIYKSNGRQFVAEYWDCFNKGVEMISRYYNIDKDTVRAFLKKSDRIPSLIPDLREEVDRRFVDHAIYSKYQKEIADHEGKKFKEPTYEEAEQAYRVSMENLYPTDLQFAHGLSMPLISCKPERKYRGEITAANPVKLREIDGKLYTLSRKEIGKIERKDIEKIYTSDTQLIAYLIELFDGAKDTATLGDIMKEKSISEIRTKNGNAIRKLTLRNICNKDFLKKEIDENNHTYLDTAKYYCVELYKDIKNQLQVQGIKRADIILQNGKLCLAPWYKQPDDYFKHVMYLQKNDYLKVYKNGKLSFCGYYRSAAGLTNSRLYFIIDNQPEDKKKYITLKLEVKKYSVDILGKIGKKEIKCGEPLSSAKVKK

SEQ ID NO: 2631 - protein, 566 aa, unidentified
  REGION 1..566: note = Description of Unknown: uncultivated organism sequence
  REGION 1..566: note = Category: MG81 effectors
  REGION 1..566: note = Description: MG81-920 effector
MGWKSKGRGGTLVDNEEKKEDGATCCLTLPLKLEKWQSDHLEKRFEIARQLYNTLVHAELKRIHRIERMPEYREIERLIEATTDKKEKWALKNQKKQFLRKNGINRNTFTTDMKRLYKHFNDNIGSNVAQHGIVSQVLTAFEKVYIENQSGEVHFKKPGDLRSVQGYSQKKSGGVEIMFREGKIIWTQQENDDRKKSPKYQQRKKRQNYKGVKGIAREFPVVFSKNNPYEAEMLTKHVKFVRILRKDGKTKPHWYAQLVLEGRPVTKYDPISGAPKHPVGHGVVGIDIGTRTLAYSNDKEVNLLELADRVQNIEQEKRRLQRKMDRSRRAMNPENYNSDGTFKRGVKLTRNKSKRYRRIQHQLAMIQHHQADIRKQQHNELANYLLTLGDCFFVENMSYCDLVHRANKTEISEKTGRYKRKKRFGKSIANKAPAMLITMLKQKCQSRGLKGVKEVDTHVRASQYNHQTDTCIEKALENRWNVMPDGERIQRDLYSAFLLQHCKQGLPEYNRKELKKEFGEELYRVFDREALQRDYPQFVAYHHMTIQRLSELPHTIPSMGIRRIIS

SEQ ID NO: 2632 - protein, 541 aa, unidentified
  REGION 1..541: note = Description of Unknown: uncultivated organism sequence
  REGION 1..541: note = Category: MG81 effectors
  REGION 1..541: note = Description: MG81-921 effector
MVQSTADAEAKSVMYRAYKFRLDPNNEQVKALYQAAGAARYTYNMMTAYNLEIKKNRDEFWYAHITEDSDEQYKKQVESQLKALEKAEPARYKPLCQYASFSTQKLTPAKHKHKEVSEAIAQGVLPNDAWGSEEHPKNPWLHEANQRVLVSGLQNSAKAWKNFWDSQTGRRKGAKVNLPRLKKRGISRDSFTVPAPEAMGGYGAPYKNDSEQYKRLKKKGKDAVIQDYRHVRLSYLGVLRTFNSTKPLAKAVNTGAKIKSYTVSRNADRWYVSFLVELSEPIARPATKKQRAAGGVGIDLGVKTLVTLSDESNPYIANLRPGQRAQRKLRKLQQKFARSQKGSNRRARLAAEIARLHHKVALRRKGYLDQVTKGLVTQYSAVACEDLNVSGMVHSAKGTVENPGKNVAAKSGLNRSILDASFGMFIRQLEYKSAWYGSVVLKVDKWFPSSRTCFNCGEVKSKLPLSERVYDCQYCGYSADRDLNAARNILEQAYKEKEDKQNPQFAPERGENSNGRGRGSTCSVESGETSRPADGSAGHRR

SEQ ID NO: 2633 - protein, 508 aa, unidentified
  REGION 1..508: note = Description of Unknown: uncultivated organism sequence
  REGION 1..508: note = Category: MG81 effectors
  REGION 1..508: note = Description: MG81-922 effector
MKRHLDQLLRTKKYRGLRKSYGKISKSIKSLQQIKELSNVQKRHLKDQKKNLQTVSDQMNEMQETYHVTWEYCRNTMKTLRLKYEQTSVIALSRAEDIWTAVSKVLYSDGERLHFKKRGDLPELRAKQFHKEIIGRVKNGFLEFRYGKVSLPVIRKETDLWLMNELEAVESYLKDPDFHDAYAINQMQQGEIVSTYRPCYASIVCKTIRGKLRVYLHLTVEGLPFSKRTNDGIIKHPYGNGPVGCDIGTQTIAYTSDHTVGLENLAERGNSICYVERWQRLVQRAMDRSRRAMNPDNYNDDGTIRKGKKTWIKSKRYQKLQLRYRELCRISAENRRLAIHEQVHKMRSLGDIFVTEAKNAKKLQKRANPENPLDKNGRPKRKKRFGRSIQNRCPGYFQAKVKQLFESTGGTYIEVPSDYRASQYDHTVDDYIKKKLSQRMYNLKDGTKVQRDWYSSFLLYCIDLITKTIDRQKCLATFETQLNKEHAMIEEIIHLKKHIMNSGIRVAV

SEQ ID NO: 2634 - protein, 1323 aa, unidentified
  REGION 1..1323: note = Description of Unknown: uncultivated organism sequence
  REGION 1..1323: note = Category: MG81 effectors
  REGION 1..1323: note = Description: MG81-923 effector
MKVSKVDHTSAGVTSKKDITYNGLLYRNPPKKGVNEILKDAETDEKILENMENYITRLNNRASSLYSVFNPIGNEKSKDNKSAEKDLYRNISSCFRDFVQDIKSNSADTASRNLLNRSFRVNSDKETIDNFVARYLRKSLQKRVNGYELSEIIRNIIYLKANLYRKEDVPVKEVCILAEAIKEDITKERQIKKMAVSIVKQDVKIQTYLSDDGKVLLRHTFAKHSKKSALFRFLQKFTSADIEEQEEMIRELRALVVLFYCGPNAYKEAQGDGIGVWTFGKTASDVRVNFCEEACRLITEYQAELERVETEKKEKSSNVKPVNTDIYKEKIKKAIRYSIAGSYQEAARTLKETEGFEDKRLWLGLIEEYAERILLSNRRFMDPGTQNCEFLCKRTMQMLISYIAMKLVDLGKAVYHFAMPAQIDVTNGKPAEFGEVQPSFRDGITSFDYEWIKAEESLTRELSTYSVFAVRNFLNSISKKESDIIAVNLNDVESGNLKSNSVMRVLRYFGGKKEWQDTYIGEVSENELINALRKEIGAARNSTFHYAGTIDNGITDDDKLIISQIYEKEHGDIGRIRRKKYYSNNALMFYKKTDIDALMDYLYSAPKDHPAQIPAFSKILNKNKVYEFSKFIKGNPKKKISTAGKTEELKGCVFYMLKECYYYGFLPDSRSALFVREALEDIVKSAEDAGPAATDRRLEAAQNFKKRFYEISEKASLGQICQRIMTDFQLQNGGQKKVQSSKYAKKGVGEPIYQHFRMMLYDILRKAFWKYLNTLTETGEMNFMFMREPSYKPEFATEEEFCKNWNDHSYDDIREGMEEDSYLEAWFTAAHFIAPAQLNHLIGSFKKYEQFTSDIKFRAEGNGIECNSRWQNRIHQDEMHRLLRVLEFVQMTNGTFSKEISDYYGRDVDSAIEEYAEFVENFVDFSTKKMPNKHVALQTFCNIAVKSGSPNGRIGIYYDGEKPILNRNIVMADMYGNVSLISNCMKKVTEREIKVFYNDMNNLTEVFKRGVCQNEDEQKRLKAFQNNKNRVELLDVAIYTEIVNELYAQLVSWSYLRERDLMYYQLGVNYMKLFNGNSVPKDSFLRIIQGNGANITEGAVLYQLVAMNSFGWPLLCRDGSADKKANTTGQKVDSFFKDYCRKDASIYESCLMLFERLQSHDAIIKEIRNPIDHMYYFEKGKNGATKSILEMYGDIYDRFFDYDLKLKKSVSFVLQNILLDHFIIAHTVMNRQEEKYKYKNKDGQEKSYTGTKLAIRPNREQKKKVFDKTIRKMKEISIIHYGMESDVLTYKIKVDSMPVLVIVDARSRMFLDQMQRILEYSKT

SEQ ID NO: 2635 - protein, 1134 aa, unidentified
  REGION 1..1134: note = Description of Unknown: uncultivated organism sequence
  REGION 1..1134: note = Category: MG81 effectors
  REGION 1..1134: note = Description: MG81-924 effector
MKYVIGMDIGIGSIGWSVIRSDADCKRIEDFGVRIFDPGENASDRKSNSQIRREYRSVRRVLRRRKHRKELLKAHLENIGLTTIDRINEYFKHADGDIISLRVKGLDKKLAPEEIAACLINIANRRGYRPFYENEELSQYEKTSLNKTRQFMLSGEYRTSAEMILKNEQFDSEESEYRSYRNRSGNEETVLIERKWLRDEVEKILKKQSEFYPCLNDRNTNAIKRIIFDQRDFEDGPGDKNDPFRRYTGFLESMGQCRFYPDEKRGYRATLTADTYSLVNELSQYSYVDKNGCFVFDSALAHDLIASALKNAKFTKSDFNKICKAHGIVPIYGGKGKDTDISRCFKFLKAIKPILEADGFDWETVCNIDTASDPDSILNRIGIIVSENITPARRKKALKNLNILNDDSITALCNYKFGGTSSVSYKYMSGAIEAFLNGDIYGKHQASHIEETATESVKHTKLPVFDKDFEFFKNPVVFRAINESKKVINAIIEKYGSPSAINIEVGSEVSRSFANRTADKNEQTKRMKEKDAAKKAIAELLGVDIANVTSKMIDRYFLGELQGWKCMYSGKEINKEECLRGSKAYEIDHIVPFSLILDNTLNNKALVLTSENQLKKQQTPLMYLSGERRKNFIGTVNELFRAKKIKKKKYAYLLQPDLNDEKMSEWKSRNLNDMRHISRFMVGYLKENLKFDNSSKLEGRWQNVYAVKGSLTSMFRKLWLNETTWGRADKASIKAETYLDHAVDAVVIGNCLPVYVEIAQVNLRLRDIYKSNGRQFVAEYWDCFNKGVEMISRYYNIDKDTVRAFLKKSDRIPSMIPDLREEVDRRFVDHAIYSKYQKEIADHEGKKFKEPTYEEAEQAYRTSMENLYPTDLQFAHSLSMPLISCKPERKFSGKITADNPVKLREIDGKLYTLSKKEIGKIERKDIEKIYTSDTQLIAYLIELFDGAKDTATLGDIMKEKGISEIRTKNGNAIRKLTLRNICNKDFLKKEIDENNHTYLDTAKYYCVELYKDIKNQLQVQGIKRADIILQNGKLCLAPWYKQPDDYFKHVMYLQKNDYLKVYKNGKLSFCGYYRSAAGLTNSRLYFIIDNQPEDKKKYITLKLEVKKYPVDILGKIGKKEIKCGEPLSSAKVKK

SEQ ID NO: 2636 - protein, 537 aa, unidentified
  REGION 1..537: note = Description of Unknown: uncultivated organism sequence
  REGION 1..537: note = Category: MG81 effectors
  REGION 1..537: note = Description: MG81-925 effector
MITDKEHKRHLKQFHKLSDRHILAVETDMSYSDVLKVVALSDKIRKAGNELIGIMRKNYNQLMRTKRYRKLLFLYGNSKDKNKRKTYAKQLNEMQKAYNITWEYCRTSMIPIGKKYGVDAVFALTKAEDIWRGMEKCLYGNGNILHFSRYGELPCIRAKQMNRGIRIFVKDNMLQFKLGRMVFGIQTNDRFQQDEVDAVLSYLAESEILNDRAVNTLIKDDYCIDTYRPCYATLVPKMIRGKYRVYLHLTIEGRAKPKYDRFGNPRHKYGKGMIGADIGTQTVAYTSDTEVGLKNLSERGNSIQTSERKERLLYRAMDRSRRATNPQNYNDDGTVKKGRKTWIYSNHYKKLKEKHSELCRINAINRQLAINEDANHLRSLGDLFITEPKNAGKLMRRAKETTVNCKGKFNRKKRFGKSIKNRCPSGFQAAVEQKFKVSGGIYIEVSNDYRASQYDHTIDEYIKKKLSDRMYKLQDGTEVQRDWYSSFLLYCYDYRTKDIDKNKCISEFDKCYNKEKALIEWIKVNEIKVLNSGIKIA

SEQ ID NO: 2637 - protein, 1138 aa, unidentified
  REGION 1..1138: note = Description of Unknown: uncultivated organism sequence
  REGION 1..1138: note = Category: MG81 effectors
  REGION 1..1138: note = Description: MG81-926 effector
MKYVIGMDIGIGSIGWSVIRSDADCKRIEDFGVRIFDPGENASDRKSNSQIRREYRSVRRVLRRRKHRKELLKAHLENIGLTTIDRINEYFKHADGDIISLRVKGLDKKLAPEEIAACLINIANRRGYRPFYENEELSQYEKTSLNKTRQFMLSGEYRTSAEMILKNEQFDSEESEYRSYRNRSGSEETVLIERKWLRDEVEKILKKQSEFYPCLNDRNTNAIKRIIFDQRDFEDGPGDKNDPFRRYTGFLESMGQCRFYPDEKRGYRATLTADTYSLVNELSQYSYVDENGCFVFDSALAHDLIASALKNAKFTKSDFNKICKAHGIVPIYVGKGKDTDISRCFKFLKAIKPILEADGFDWETVCNIDTASDPDSILNRIGIIVSENITPARRKKALKNLNILNDDSITALCNYKFGGTSSVSYKYMSGAIEAFLNGDIYGKHQASHIEETATESVKHTKLPVFDKDFEFFKNPVVFRAINESRKVINAIIEKYGSPSAINIEVGSEVSRSFANRTADKSEQTKRMKEKDAAKKAIAELLGVDIASVTSKMIDRYFLGELQGWKCLYSGKEINKEECLRGSKAYEIDHIVPFSLILDNTLNNKALVLTSENQLKKQQTPLMYLSGERRKNFIGTVNELFRAKKIKKKKYAYLLQPDLNDEKMSEWKSRNLNDMRYISRFMVGYLKENLKFDNSSKSEGRWQNVYAVKGSLTSMFRKLWLNETTWGRADKASIKAETYLDHAVDAVVIGNCLPVYVEIAQVNLRLRDIYKSNGRQFVAEYWDCFNKGVEMISRYYNIDKDTVRAFLKKSDRIPSLIPDLREEVDRRFVDHAIYSKYQKEVADHEGKDFKKPTYEEAEQAYRVSMENLYPTDLQFAHGLSMPLISCKPERKYRGKITADNPVKLREIDSKLYTLSKKEIGKIERKDIEKIYTSDTQLIAYLIELFDGAKDTATLGDIMKEKGISEIRTKNGNAIRKLTLRNICNKDFLKKEIDENNHTYLDTAKYYCVELYKDIKDKLRVQGIKRADIIPQNGKLCLAPWYKQPDGFFKHVMYLQKNDYLKVYENGELLFCGYYLSVEDIRNSKLYFIIDNQPGQNRKENCKSIHIKSEVKKYTVDILGKIGKKEIKCGEPLSSAKVKK

SEQ ID NO: 2638 - protein, 1146 aa, unidentified
  REGION 1..1146: note = Description of Unknown: uncultivated organism sequence
  REGION 1..1146: note = Category: MG81 effectors
  REGION 1..1146: note = Description: MG81-927 effector
MKYVIGMDIGIGSIGWSVIRSDADCKRIEDFGVRIFDPGENAGDRKRKSNSQIRREYRSVRRVLRRRKHRKELLKAHLENIGLTTIDRINEYFKHADGDIISLRVKGLDKKLAPEEIAACLINIANRRGYRPFYENEELSQYEKTSLNKTRQFMLSGEYRTSAEMILKNEQFDSEKSEYRSYRNRSGNEETVLIERKWLRDEVEKILKKQSEFYPCLNDRNTNAIKRIIFDQRDFEDGPGDKNDPFRRYTGFLESMGQCRFYPDEKRGYRATLTADTYSLVNELSQYSYVDENGCFVFDSALAHDLIASALKNAKFTKSDFNKICKAHGIVPIYGGKGKDTDISRCFKFLKAIKPILKADGFDWETVCNIDTASDPDSILNRIGIIVSENITPARRKKALKNLNILNDDSITALCNYKFGGTSSVSYKYMSGAIEAFLNGDIYGKHQASHIEETATESIKHTKLPVFDKDFEFFKNPVVFRAINESRKVINAIIEKYGSPSAINIEVGSEVSRSFANRTADKNEQTKRMKEKDAAKKAIAELLGVDIASVTSKMIDRYFLGELQGWKCLYSGKEINKEECLGGSKAYEIDHIVPFSLILDNTLNNKALVLTSENQLKKQQTPLMYLSGERRKNFIGTVNELFRAKKINKKKYAYLLQPDLNDEKMSEWKSRNLNDMRYISRFMVGYLKENLKFDNSSKSEGRWQNVYAVKGSLTSMFRKLWLNETTWGRADKASIKAETYLDHAVDAVVIGNCLPVYVEIAQVNLRLRDIYKSNGRQFVAEYWDCFNKGVEMISRYYNIDKDTIRAFLKKSDRIPSLIPDLREEVDRRFVDHAIYSKYQKEIADHEGKKFKEPTYEEAEQAYRVSMENLYPTDLQFAHGLSMPLISCKPERKYRGEITAANPVKLREIDGKLYTLSKKRIYSAADKDKIKRTDIEKIYTSDANLIAYLIELFDGAKDTATLRDIMKEKGISEIRTKNGNAIRKLTLRNICNKDFLKKEIDENNHTYLDTAKYYCVELYKDIKDKLRVQGIKRADIILQNGKLCLAPWYKQPDGYFKHVMYLQKNDYLKVYENGELLFCGYYLSVEDIGNSKLYFIIDNQPGQNKKENCKSIHIKSEVKKYTVDILGKIGKKEIKCGEPLSSAKVKK

SEQ ID NO: 2639 - protein, 974 aa, unidentified
  REGION 1..974: note = Description of Unknown: uncultivated organism sequence
  REGION 1..974: note = Category: MG81 effectors
  REGION 1..974: note = Description: MG81-928 effector
MQVHDDVILGLDIGVGSLGWALLEEDLQTGEQRLLQRQTPQGETTYALGVRLFHVPENAKTKELLNVKRRTARMQRRTTARRAQRMRRVRALLDSLGVPGVRDADAFHLGKGRGAQCDPWQLRREGLERRLEAREWAVVLLHIAKHRGFRSNSKTDRSGSDKEMGQVLQAVSNLQQEVEASGLTVGALLASRERRRNRADHTGAPRYDLCMLRSLQENEVDILFTRQRELGNPLAGEEVRCRYAELAFAQRPLAPVSHMVGPCAFLEGERRAPRFAPTAELFRYVQALCNMRLRQETGEETPLSEEQRQAACAVFGSVQSVTYKKLRQVLRLPAGCRFAGLSYGVTEKGNVQDPEKADVVMRTGKCCQGTACLRGILGDAYEALHEQRLDEADAARLAATGALSAPAAALLARGMAGLRLTDAVARIVSELNDLDQIRAVLALLPLAAPRIAALSQAAGEGKLGIFQGSARLSLRAMEAILPHMLACGEYAAACELAGFDPRAAQKTDVTDIRNPVVLRVFREVRRQFSAICREFGFLPGRVHVELLREVGKSGEERNRISRGLERRTKEKEAARKAVAQLLGKSPETVSAGEVQRYELWRQQDGKCAYYMLWRHAGGERAYGDAMPQGSIPPAWLADGVNAVQVDHILPRSRTFDNSFHNLCLCCHAANQAKGGRTPWEWLGAAQPQAWHDFEQWVQSLPLKGLKKRNYLLRDLNAEVQGRFHARNLTDSGYVARLTLRWLEGEYARHDVPMQDADGRTRRRFFARPGQVTDFLRRHWGVQALKKIDGQRSGDRHHALDALLVAACSEGMLQRMVRAFQREENGPERLHIPCPWQDFSATVGRALGSVFVSRGTRPHQGPPARGDPARHTRGTAARRGDAARAVRAQGRGQADGGRPGQDQGRRPLPGRGGGPAPLAECGQARGCPAPLGTWRHHPACARLRRRVQQRRGAATGIGTGPSQQRRHGAHGHLQP

SEQ ID NO: 2640 - protein, 1098 aa, unidentified
  REGION 1..1098: note = Description of Unknown: uncultivated organism sequence
  REGION 1..1098: note = Category: MG81 effectors
  REGION 1..1098: note = Description: MG81-929 effector
MQVRDDVILGLDIGVGSLGWALLEEDLQTGEQRLLQRQAPQGETSYALGVRLFNVPENPKTKELLNVKRRTARMQRRTTARRAQRMRRVRALLDSLGVPGVRDADAFHLGKGRGAQYDPWQLRREGLERRLEAREWAVVLLHIAKHRGFRSNSKTDSSGSDKEMGQVLQAVSNLQQEVEASGLTVGALLASRERRRNRADHTGAPRYDLCMLRSLQEDEVNILFTRQRELGNPLAGEDIRCRYAELAFAQRPLAPVSHMVGPCAFLEGERRAPRFAPTAELFRYVQALCTMRLRQETGEETPLSEEQRQAACAVFGSVQSVTYKKLRQVLRLPAGCRFVGLSYGVTGKGKVQDPEKADVVMRTGKCCQGTACLRGILGDAYDALHEQRLDEADAARLAATDALSAPAAALLARGMAGLRLTDALVRIVSELNDLGQIRAILALLPLPAPRIAALSQAAGEGKLGFFQGTARLSLRAMEAILPHMLACGEYAAACELAGFDPRAAQKTDVTDIRNPVVLRVFREVRRQFSAICREFGFLPGRVHVELLREVGKSGEERNRISRGLERRTKEKEAARKAVAQLLGKSPEAVSAGEVQRYELWRQQDGKCAYYMLWRHAGGERAYGNAMPQGSIPPAWLADGVNAVQVDHILPRSRTFDNSFHNLCLCCHAANQAKGGRTPWEWLGAAQPQAWHDFEQWVQSLPLKGLKKRNYLLRDLSAEVQGRFHARNLTDSSYVARLTLRWLEEEYARHDVPMQDAEGRTRRRFFARPGQVTDFLRRHWGVQALKKIDGQRSGDRHHALDALLVAACSEGMLQRMVRAFQREENGPERLHIPCPWQDFSATVGRALGSVFVSRVERGRTKGPLHEETLRAIREERQPDGETRRVLYERKAVARLTAADLDRIKDAARCPDVVAALRRWLDAGKPGDDLPRSAHGDIIRHVRVRAGEFSSGVILQRGSGQAQAKNGGIVRTDIYSRDGKFYMVPVYAKDVADKRLPLRACVAHKDEKDWLELTEDYHFLFSLTPDCYVLTENRKGEVKEGYFEGPDRGSANISLSLAHDKKNTIRGIGIQNLKRFEKYRVDRFGRLSLVRREADPRGRP

SEQ ID NO: 2641 - protein, 1098 aa, unidentified
  REGION 1..1098: note = Description of Unknown: uncultivated organism sequence
  REGION 1..1098: note = Category: MG81 effectors
  REGION 1..1098: note = Description: MG81-930 effector
MQVRDDVILGLDIGVGSLGWALLEEDLQTGEQRLLQRQAPQGETSYALGVRLFNVPENPKTKELLNVKRRTARMQRRTTARRAQRMRRVRALLDSLGVLGVRDADAFHLGKGRGAQCDPWQLRREGLERRLEAREWAVVLLHIAKHRGFRSNSKTDSSGSDKEMGQVLQAVSNLQQEVEASGLTVGALLASRERRRNRADHTGAPRYDLCMLRSLQEDEVNILFTRQRELGNPLAGEDIRCRYAELAFAQRPLAPVSHMVGPCAFLEGERRAPRFAPTAELFRYVQALCTMRLRQETGEETPLSEEQRQAACAVFGSVQSVTYKKLRQVLRLPAGCRFVGLSYGVTEKGKVQDPEKADVVMRTGKCCQGTACLRGILGDAYDALHEQRLDEADAARLAATDALSAPAAALLARGMAGLRLTDALVRIVSELNDLGQIRAILALLPLPAPRIAALSQAAGEGKLGFFQGTARLSLRAMEAILPHMQACGEYAAACELAGFDPRAAQKTDLTDIRNPVVLRVFREVRRQFSAICREFGFLPGRVHVELLREVGKSGEERNRISRGLERRTKEKEAARKAVAQLLGKSPEAVSAGEVQRYELWRQQDGKCAYYMLWRHAGGERAYGNAMPQGSIPPAWLADGVNAVQVDHILPRSRTFDNSFHNLCLCCHAANQAKGGRTPWEWLGAAQPQAWHDFEQWVQSLPLKGLKKRNYLLRDLSAEVQGRFHARNLTDSSYVARLTLRWLEEEYARHDVPMQDAEGRTRRRFFARPGQVTDFLRRHWGVQALKKIDGQRSGDRHHALDALLVAACSEGMLQRMVRAFQREENGPERLHIPCPWQDFSTTVGRALGSVFVSRVERGRTKGPLHEETLRAIREERQPDGETRRVLYERKAVARLTVADLDRIKDAARCPDVVAALRRWLDAGKPGDDLPRSAHGDIIRHVRVRAGEFSSGVILQRGSGQAQAKNGGIVRTDIYSRDGKFYMVPVYAKDVADKRLPLRACVAHKDEKDWLELTEDYHFLFSLTPDCYVLTENRKGEVKEGYFEGPDRGSANISLSLAHDKKNTIRGIGIQNLKRFEKYRVDRFGRLSLVRREADPRGRP

SEQ ID NO: 2642 - protein, 605 aa, unidentified
  REGION 1..605: note = Description of Unknown: uncultivated organism sequence
  REGION 1..605: note = Category: MG81 effectors
  REGION 1..605: note = Description: MG81-931 effector
MPDHINVFVDVPQTAAPCDVAGTFKDMSAIELFKAFPQLIQFYAGYCVLWSRGYFVSTVIKIILRSRKMITDKEHKRHLKQFHKFSDRHILAVETDMPYSDVLKVVALSDKIRKAGNELVGLMRKNYDQLMRTKRYRKLLFLYGNTKDKDKRKTYAKQLNEMQKAYNITWEYCRTSMIPIGKKYGVDAVFALTKAEDIWRGMEKCLYGNGNAIHFSKYGELPCIRAKQMNRGIPISVTDNKLHFKLGRMVFGIQTNDRFQQDEVDAVLSYLAESEILDDKAVNTLIKDGCCIDTYRPCYATLVPRMIRGKYRVYLHLTIEGKAKPKYDKHGNPRHKLGKGMIGADIGTQTVAYTSDTKVGLKNLSERGSSIQTSERKERLLYRAMDRSRRATNPQNYNDDGTVKKGRKTWIYSNHYKKLKTKYSELCRINAINRQLAINEDANHLRSLGDVFITEPKNAGKLMRRAKETTVNSKGKFNRKKRFGKSIKNRCPSGFQSAVEQKFKVSGGIYIEVSNDYRASQYDHTIDDYIKKKLSDRMYKLQDGTEVQRDWYSSFLLYCYDYRTKDIDKSKCISEFDKCYNKEKALIEWIKVNEIKVLNSGIKIA

SEQ ID NO: 2643 - protein, 501 aa, unidentified
  REGION 1..501: note = Description of Unknown: uncultivated organism sequence
  REGION 1..501: note = Category: MG81 effectors
  REGION 1..501: note = Description: MG81-932 effector
MNEGDGMPKEEKESCCVLQLRLYPEPWQVQIIETRFKVLEHLKNSLIALELRKLRNLERTRAYREIQEQIKLADDKSKIKLYAKRRKLLKDAGFSEFVFKDDITPMQKHFAAHIATHVAHRAASEVWRAFDKFLFGNGKMVHYVRRGTLRSASNQTAGTTMTLENGYFKWNGGRDQNSIAINIRVAKPTTYYEKEMLQKKAKYFRIVRKWGKIGYKYYLQITLAGLPAVKPRLIANEKKVGIDIGPSSIAIVSDKKVELRALADKVQNNHIEKCSLQRSMDRSRRNLNPQNYNEDGTIRRGIRLNWTFSKHYIEMRGKVRMLERKNVDIRKYQHTCLANEVILLGTDVYIEQMSFKGLQRRAKETTYREDGRPKRKKRFGKSIANRAPAMFVEILGRKLTTIVGTELNKVDTFKFRASQYDHTNGSYKKKLLKERWAQLSNGDRIQRDLYSAFLLKNSNADLNSTNVEQCNATYDAFKIMHDDCITKLKSEKKSCLPSFGV

SEQ ID NO: 2644 - protein, 567 aa, unidentified
  REGION 1..567: note = Description of Unknown: uncultivated organism sequence
  REGION 1..567: note = Category: MG81 effectors
  REGION 1..567: note = Description: MG81-933 effector
MTKRKKHQITEYEKCLREYHKASPRHVIVLETDLTEDEKRHLFHQADLLRQCGNELLGIMKRHLDQLLRTKKYRGLRKSYGKISKSIKSLQQIKELSNVQKRHLKDQKKNLQTVSDQMNEMQEEYHITWEYCRNTMKTLRLKYEQTSVIALSRAEDIWTAVSKVLYSDGERLHFKKRGDLSELRAKQFHKEIIGRVKNGSLEFRYGKVSLPVIRKETDLWLMDELEAVESYLKDPSFHDAYAIDQMKHGEIVSTYRPCYASIVCKTIRGKLRVYLHLTVEGLPFPKRTKDGVIKHLCGDGIVGCDIGTQTIAYTSDHVVGLENLAERGNSIRCVERQQRLVQRAMDRSRRAMNPDNYNADGTIRKGKKTWIKSKRYQKLQLSYRELCRVSAENRKLAIHEQVHKMRSLGDVFVTEAKNAKKLQKRANPEDPLNKNGKPKRKKRFGRSIQNRCPGYFQAKIQQLFESTGGTYIEVPSDYRASQYDHTVDDYIKKKLSQRMFNLKDGTKVQRDWYSSFLLYCIDLITKTIDRQKCLATFETQLNKEHAMIEEIIRLKKRIMNSGIRVAA

SEQ ID NO: 2645 - protein, 1098 aa, unidentified
  REGION 1..1098: note = Description of Unknown: uncultivated organism sequence
  REGION 1..1098: note = Category: MG81 effectors
  REGION 1..1098: note = Description: MG81-934 effector
MQVHDDVILGLDIGVGSLGWALLEEDLQTGEQRLLQRQTPQGETTYALGVRLFHVPENAKTKELLNVKRRTARMQRRTTARRAQRMRRVRALLDSLGVPGVRDADAFHLGKGRGAQCDPWQLRREGLERRLEAREWAVVLLHIAKHRGFRSNSKTDRSGSDKEMGQVLQAVSNLQQEVEASGLTVGALLASRERRRNRADHTGAPRYDLCMLRSLQENEVDILFTRQRELGNPLAGEEVRCRYAELAFAQRPLAPVSHMVGPCAFLEGERRAPRFAPTAELFRYVQALCNMRLRQETGEETPLSEEQRQAACAVFGSVQSVTYKKLRQVLRLPAGCRFAGLSYGVTEKGNVQDPEKADVVMRTGKCCQGTACLRGILGDAYEALHEQRLDEADAARLAATGALSAPAAALLARGMAGLRLTDAVARIVSELNDLDQIRAVLALLPLAAPRIAALSQAAGEGKLGIFQGTARLSLRAMEAILPHMLACGEYAAACELAGFDPRAAQKTDVTDIRNPVVLRVFREVRRQFSAICREFGFLPGRVHVELLREVGKSGEERNRISRGLERRTKEKEAARKAVAQLLGKSPETVSAGEVQRYELWRQQDGKCAYYMLWRHAGGERAYGDAMPQGSIPPAWLADGVNAVQVDHILPRSRTFDNSFHNLCLCCHAANQAKGGRTPWEWLGAAQPQAWHDFEQWVQSLPLKGLKKRNYLLRDLNAEVQGRFHARNLTDSGYVARLTLRWLEEEYARHDVPMQDADGRTRRRFFARPGQVTDFLRRHWGVQALKKIDGQRSGDRHHALDALLVAACSEGMLQRMVRAFQREENGPERLHIPCPWQDFSATVGRALGSVFVSRVERGRTKGPLHEETLRAIREERQPDGETRRVLYERKAVARLTAADLDKIKDAARCPDVVAALRRWLDAGKPGDALPRSAHGDIIRHVRVCAGEFSSGVVLQRGSGQAQASNGGMVRTDIYSRDGKFYMVPVYAKDVADKRLPLRACVAHKDEKDWPEMTADYRFLFSLTPDCYVLTENRKGEIKEGYFSGADRSSANISLTLAHDRKSSIRGIGIQKLRRFEKYRVDRFGRLSPVRREADPRGRS

SEQ ID NO: 2646 - protein, 441 aa, unidentified
  REGION 1..441: note = Description of Unknown: uncultivated organism sequence
  REGION 1..441: note = Category: MG81 effectors
  REGION 1..441: note = Description: MG81-935 effector
MDADEYKKLLKKFHKLSDRHILVAETDMSYPDVQKVVNFSGRIRKAGNELVGVMKKNYEQLMRTKKYRKMLQLYGSTEDKNKRKTYAGQLNEMQEQYNVTWDFCRVSMIPIGKKYGIDAIFALAKAEDVWRGVEKCLYGNGRMLHFSRYGDFPCIRAKQINRGVPMSVKNDELKFKLGKLVFGIQVKDRFQTDEVNAVLDYLAQPEVIDNKAVKTLQDEACCISTYRPCYATLVPKFIRGKYRVYLHLVIEGKAKPKYDSSGNPRHKYGRGVVGADIGTQTIAYTSDTETGLKNLSERGNSIQKSERLERLYYRAMDRSRRATNPKNYNADGTIKKGKKKWTYSRHYKKLKAKHAELCCINATNRQLAINEDVNHLRCLGDTFVTEPKNAARLMKRSKDTTVNNKGKINRKKRFGKSVKNRCRAVSRLPWKISSKHPAVHT

SEQ ID NO: 2647 - protein, 1098 aa, unidentified
  REGION 1..1098: note = Description of Unknown: uncultivated organism sequence
  REGION 1..1098: note = Category: MG81 effectors
  REGION 1..1098: note = Description: MG81-936 effector
MQVHDDVILGLDIGVGSLGWALLEEDLQTGEQRLLQRQTPQGETTYALGVRLFHVPENAKTKELLNVKRRTARMQRRTTARRAQRMRRVRALLDSLGVPGVRDADAFHLGKGRGAQCDPWQLRREGLERRLEAREWAVVLLHIAKHRGFRSNSKTDRSGSDKEMGQVLQAVSNLQQEVEASGLTVGALLASRERRRNRADHTGAPRYDLCMLRSLQENEVDILFTRQRELGNPLAGEEVRCRYAELAFAQRPLAPVSHMVGPCAFLEGERRAPRFAPTAELFRYVQALCNMRLRQETGEETPLSEEQRQAACAVFGSVQSVTYKKLRQVLRLPAGCRFAGLSYGVTEKGNVQDPEKADVVMRTGKCCQGTACLRGILGDAYEALHEQRLDEADAARLAATGALSAPAAALLARGMAGLRLTDAVARIVSELNDLDQIRAVLALLPLAAPRIAALSQAAGEGKLGIFQGSARLSLRAMEAILPHMLACGEYAAACELAGFDPRAAQKADVTDIRNPVVLRVFREVRRQFSAICREFGFLPGRVHVELLREVGKSGEERNRISRGLERRTKEKEAARKAVAQLLGKSPEAVSAGEVQRYELWRQQDGKCAYYMLWRHAGGERAYGNAMPQGSIPPAWLADGVNAVQVDHILPRSRTFDNSFHNLCLCCHAANQAKGGRTPWEWLGAAQPQAWHDFEQWVQSLPLKGLKKRNYLLRDLSAEVQGRFHARNLTDSSYVARLTLRWLEEEYARHDVPMQDAEGRTRRRFFARPGQVTDFLRRHWGVQALKKIDGQRSGDRHHALDALLVAACSEGMLQRMVRAFQREENGPERLHIPCPWQDFSATVGRALGSVFVSRVERGRTKGPLHEETLRAIREERQPDGETRRVLYERKAVARLTAADLDRIKDAARCPDVVAALRRWLDAGKPGDALPRSAHGDIIRHVRVCAGEFSSGVVLQRGSGQAQASNGGMVRTDIYSRDGKFYMVPVYAKDVADRRLPLRACVAAKAEKDWREMTADYRFLFSLTPDCYVLTENRKGEVKEGYFIGSDRSTAAISLSLAHDRQQSLRGIGITTLKRFEKYRVDRFGRLSSVRREADPRGRS

SEQ ID NO: 2648 - protein, 1098 aa, unidentified
  REGION 1..1098: note = Description of Unknown: uncultivated organism sequence
  REGION 1..1098: note = Category: MG81 effectors
  REGION 1..1098: note = Description: MG81-937 effector
MQVRDDVILGLDIGVGSLGWALLEEDLQTGEQRLLQRQTPQGETTYALGVRLFHVPENAKTKELLNVKRRTARMQRRTTARRAQRMRRVRALLDSLGVPGVRDADAFHLGKGRGAQCDPWQLRREGLERRLEAREWAVVLLHIAKHRGFRSNSKTDRSGSDKEMGQVLQAVSNLQQEVEASGLTVGALLASRERRRNRADHTGAPRYDLCMLRSLQENEVDILFTRQRELGNPLAGEEVRCRYAELAFAQRPLAPVSHMVGPCAFLEGERRAPRFAPTAELFRYVQALCNMRLRQETGEETPLSEEQRQAACAVFGSVQSVTYKKLRQVLRLPAGCRFAGLSYGVTEKGNVQDPEKADVVMRTGKCCQGTACLRGILGDAYEALHEQRLDEADAARLAATGALSAPAAALLARGMAGLRLTDAVARIVSELNDLDQIRAVLALLPLAAPRIAALAQAAGEGKLGIFQGSARLSLRAMEAILPHMLACGEYAAACELAGFDPRAAQKTDVTDIRNPVVLRVFREVRRQFSAICREFGFLPGRVHVELLREVGKSGEERNRISRGLERRTKEKEAARKAVAQLLGKSPETVSAGEVQRYELWRQQDGKCAYYMLWRHAGGERAYGDAMPQGSIPPDWLADGVNAVQVDHILPRSRTFDNSFHNLCLCCHAANQAKGGRTPWEWLGAAQPQAWHDFEQWVQSLPLKGLKKRNYLLRDLNAEVQGRFHARNLTDSGYVARLTLRWLEEEYARHDVPMQDADGRTRRRFFARPGQVTDFLRRHWGVQALKKIDGQRSGDRHHALDALLVAACSEGMLQRMVRAFQREENGPERLHIPCPWQDFSATVGRALGSVFVSRVERGRTKGPLHEETLRAIREERQPDGETRRVLYERKAVARLTAADLDKIKDAARCPDVVAALRRWLDAGKPGDDLPRSAHGDIIRHVRVRAGEFSSGVILQRGSGQAQAKNGGIVRTDIYSRDGKFYMVPVYAKDVADKRLPLRACVAHKDEKDWLELTEDYHFLFSLTPDCYVLTENRKGEVKEGYFEGPDRGSANISLSLAHDKKNTIRGIGIQNLKRFEKYRVDRFGRLSLVRREADPRGRS

SEQ ID NO: 2649 - protein, 1098 aa, unidentified
  REGION 1..1098: note = Description of Unknown: uncultivated organism sequence
  REGION 1..1098: note = Category: MG81 effectors
  REGION 1..1098: note = Description: MG81-938 effector
MQVHDDVILGLDIGVGSLGWALLEEDLQTGEQRLLQRQTPQGETTYALGVRLFHVPENAKTKELLNVKRRTARMQRRTTARRAQRMRRVRALLDSLGVPGVRDADAFHLGKGRGAQCDPWQLRREGLERRLEAREWAVVLLHIAKHRGFRSNSKTDRSGSDKEMGQVLQAVSNLQQEVEASGLTVGALLASRERRRNRADHTGAPRYDLCMLRSLQENEVDILFTRQRELGNPLAGEEVRCRYAELAFAQRPLAPVSHMVGPCAFLEGERRAPRFAPTAELFRYVQALCNMRLRQETGEETPLSEEQRQAACAVFGSVQSVTYKKLRQVLRLPAGCRFAGLSYGVTEKGNVQDPEKADVVMRTGKCCQGTACLRGILGDAYEALHEQRLDEADAARLAATGALSAPAAALLARGMAGLRLTDAVARIVSELNDLDQIRAVLALLPLAAPRIAALSQAAGEGKLGIFQGSARLSLRAMEAILPHMLACGEYAAACELAGFDPRAAQKTDVTDIRNPVVLRVFREVRRQFSAICREFGFLPGRVHVELLREVGKSGEERNRISRGLERRTKEKEAARKAVAQLLGKSPETVSAGEVQRYELWRQQDGKCAYYMLWRHAGGERAYGDAMPQGSIPPAWLADGVNAVQVDHILPRSRTFDNSFHNLCLCCHAANQAKGGRTPWEWLGAAQPQAWHDFEQWVQSLPLKGLKKRNYLLRDLNAEVQGRFHARNLTDSGYVARLTLRWLEEEYARHDVPMQDADGRTRRRFFARPGQVTDFLRRHWGVQALKKIDGQRSGDRHHALDALLVAACSEGMLQRMVRAFQREENGPERLHIPCPWQDFSATVGRALGSVFVSRVERGRTKGPLHEETLRAIREERQPDGETRRVLYERKAVARLTAADLDKIKDAARCPDVVAALRRWLDAGKPGDALPRSAHGDIIRHVRVCAGEFSSGVVLQRGSGQAQASNGGMVRTDIYSRDGKFYMVPVYAKDVADKRLPLRACVAHKDEKDWPEMTADYRFLFSLTPDCYVLTENRKGEIKEGYFSGADRSSANISLTLAHDRKSSIRGIGIQKLRRFEKYRVDRFGRLSPVRREADPRGRS

SEQ ID NO: 2650 - protein, 1098 aa, unidentified
  REGION 1..1098: note = Description of Unknown: uncultivated organism sequence
  REGION 1..1098: note = Category: MG81 effectors
  REGION 1..1098: note = Description: MG81-939 effector
MQVHDDVILGLDIGVGSLGWALLEEDLQTGEQRLLQRQTPQGETTYALGVRLFHVPENAKTKELLNVKRRTARMQRRTTARRAQRMRRVRALLDSLGVPGVRDADAFHLGKGRGAQCDPWQLRREGLERRLEAREWAVVLLHIAKHRGFRSNSKTDRSGSDKEMGQVLQAVSNLQQEVEASGLTVGALLASRERRRNRADHTGAPRYDLCMLRSLQENEVDILFTRQRELGNPLAGEEVRCRYAELAFAQRPLAPVSHMVGPCAFLEGERRAPRFAPTAELFRYVQALCNMRLRQETGEETPLSEEQRQAACAVFGSVQSVTYKKLRQVLRLPAGCRFAGLSYGVTEKGNVQDPEKADVVMRTGKCCQGTACLRGILGDAYEALHEQRLDEADAARLAATGALSAPAAALLARGMAGLRLTDAVARIVSELNDLDQIRAVLALLPLAAPRIAALSQAAGEGKLGIFQGSARLSLRAMEAILPHMLACGEYAAACELAGFDPRAAQKTDVTDIRNPVVLRVFREVRRQLSAICREFGFLPGRVHVELLREVGKSGEERNRISRGLERRTKEKEAARKAVAQLLGKSPETVSAGEVQRYELWRQQDGKCAYYMLWRHAGGERAYGDAMPQGSIPPAWLADGVNAVQVDHILPRSRTFDNSFHNLCLCCHAANQAKGGRTPWEWLGAAQPQAWHDFEQWVQSLPLKGLKKRNYLLRDLNAEVQGRFHARNLTDSGYVARLTLRWLEEEYARHDVPMQDADGRTRRRFFARPGQVTDFLRRHWGVQALKKIDGQRSGDRHHALDALLVAACSEGMLQRMVRAFQREENGPERLHIPCPWQDFSATVGRALGSVFVSRVERGRTKGPLHEETLRAIREERQPDGETRRVLYERKAVARLTAADLDKIKDAARCPDVVAALRRWLDAGKPGDALPRSAHGDIIRHVRVCAGEFSSGVVLQRGSGQAQASNGGMVRTDIYSRDGKFYMVPVYAKDVADKRLPLRACVAHKDEKDWPEMTADYRFLFSLTPDCYVLTENRKGEIKEGYFSGADRSSANISLTLAHDRKSSIRGIGIQKLRRFEKYRVDRFGRLSPVRREADPRGRS

SEQ ID NO: 2651 - protein, 1132 aa, unidentified
  REGION 1..1132: note = Description of Unknown: uncultivated organism sequence
  REGION 1..1132: note = Category: MG81 effectors
  REGION 1..1132: note = Description: MG81-940 effector
MKYVIGMDIGIGSIGWSVIRSDADCKRIEDFGVRIFDPGENASDRKSNSQIRREYRSVRRVLRRRKHRKELLKAHLENIGLTTIDRINEYFKHADGDIISLRVKGLDKKLAPEEIAACLINIANRRGYRPFYENEELSQYEKTSLNKTRQFMLSGEYRTSAEMILKNEQFDSEESEYRSYRNRSGNEETVLIERKWLRDEVEKILKKQSEFYPCLNDRNTNAIKRIIFDQRDFEDGPGDKNDPFRRYTGFLESMGQCRFYPDEKRGYRATLTADTYSLVNELSQYSYVDENGCFVFDSALAHDLIASALKNAKFTKSDFNKICKAHGIVPIYGGKGKDTDISRCFKFLKTIKPILEADGFDWETVCNIDTASDPDSILNRIGIIVSENITPARRKKALKNLNILNDDSITALCNYKFGGTSSVSYKYMSGAIEAFLNGDIYGKHQASHIEETATESVKHTKLPVFDKDFEFFKNPVVFRAINESRKVINAIIEKYGSPSAINIEVGSEVSRSFANRTADKNEQTKRMKEKDAAKKAIAELLGVDIASVTSKMIDRYFLGELQGWKCLYSGKEINKEECLGGSKAYEIDHIVPFSLILDNTLNNKALVLTSENQLKKQRTPLMYLSGERRKNFIGTVNELFRAKKKKKYAYLLQPDLNDEKMSEWKSRNLNDMRYISRFMVGYLKENLKFDNSSKSEGRWQNVYAVKGSLTSMFRKLWLNETTWGRADKASIKAETYLDHAVDAVVIGNCLPVYVEIAQVNLRLRDIYKSNGRQFVAEYWDCFNKGVEMISRYYNIDKDTVRAFLKKSDRIPSLIPDLREEVDRRFVDHAIYSKYQKEIADHEGKDFEKPTYEEAEQAYRVSMENLYPTDLQFAHGLSMPLISCKPERKYRGEITAANPVKLREIDGKLYTLSKKEIGKIERKDIEKIYTSDTQLIAYLIELFDGAKDTATLGDIMKEKGISEIRTKNGNAIRKLTLRNICNKDFLKKEIDENNHTYLDTAKYYCVELYKDIKNQLQVQGIKRADIILQNGKLCLAPWYKQPDDYFKHVMYLQKNDYLKVYKNGKLSFCGYYRSAAGLTNSRLYFIIDNQPEDKKKYITLKLEVKKYSVDILGKIGKKEIKCGEPLSSAKVKK

SEQ ID NO: 2652 - protein, 512 aa, unidentified
  REGION 1..512: note = Description of Unknown: uncultivated organism sequence
  REGION 1..512: note = Category: MG81 effectors
  REGION 1..512: note = Description: MG81-941 effector
MPTKQKEDSNRCVLTLPLLTEPWQEHIIEKRFKIIEHLKNQLISIELRKLKKLQRTKAYKNLIKQIESVPKSERTALYKERNKMLKDAGFSQYTFMDDMAGKKSLMQKHFESHINVQIAHKAAIDVWSSFEKFLFGTGQIVHYQKRGTLSSVASKSPKTGMFYYSDENIFKWSGGGTKPKGGIILCLRVASVKTNYEKEMVANNEIKYYRVVRKWMKTKYKYYLQITFAGKPADKHREISTGRVGIDIGTQTIAIASDKSVKLLELADKVNKNHIKKCELQRKLDRSRRYTNPDNFNPDGTVKRGTKGHKLKWNKSKHYIEIAGKIRELERKNADIRKYQHTCLANDILAMGNQIYIEPMNYKGLQKRAKETQVDEKGRYKKKKRFGKSLANKAPAMFVTILKTKAEQHGGEVYEVDIMSYQASQCDHTTGEYTKHGLNDRWRILGNGDKVQRDLYSAFLIKNSNKTHDEIDLDKCSKTYDNFKKLHDKEIENIRNEVILRKRRNISSYGIA

SEQ ID NO: 2653 - protein, 512 aa, unidentified
  REGION 1..512: note = Description of Unknown: uncultivated organism sequence
  REGION 1..512: note = Category: MG81 effectors
  REGION 1..512: note = Description: MG81-942 effector
MPTKQKEGGNRCVLTLPLLTEPWQEHIIEKRFKIIEHLKNQLISIELRKLKNLQRTKAYKNLIKQIESVPKSERTALYKERNKMLKDAGFSQYTFMDDMAGKKSLMQKHFESHINVQIAHKAAIDVWSSFEKFLFGTGQIVHYQKRGTLSSVASKSPKTGMFYYSDENIFKWSGGGTKPKGGIILCLRVASVKTNYEKEMVANNEIKYYRVVRKWMKTKYKYYLQITFAGKPADKHREISTGRVGIDIGTQTIAIASDKSVKLLELADKVNKNHIKKCELQRKLDRSRRYTNPDNFNPDGTVKRGTKGHKLKWNKSKHYLEIAGKIRELERKNADIRKYQHTCLANDILAMGNQIYIEPMNYKGLQKRVKETQVDEKGRYKKKKRFGKSLANKAPAMFVTILKTKVEQHGGEVYEVDIMSYRASQCDHTTGEYTKHGLNDRWRILGNGDKVQRDLYSAFLIKNSNKTHDEIDLDKCSKTYDNFKKLHDKEIENIRNEVKLRERRNISSYGIA

SEQ ID NO: 2654 - protein, 512 aa, unidentified; identical to SEQ ID NO: 1750
  REGION 1..512: note = Description of Unknown: uncultivated organism sequence
  REGION 1..512: note = Category: MG81 effectors
  REGION 1..512: note = Description: MG81-943 effector

SEQ ID NO: 2655 - protein, 622 aa, unidentified
  REGION 1..622: note = Description of Unknown: uncultivated organism sequence
  REGION 1..622: note = Category: MG82 effectors
  REGION 1..622: note = Description: MG82-1 effector
MAVVVHVYGVPPVLHGERVRLPAEVDEQLSLAHCLREDLVTLEHQRQDAVTAVWSSYPQIAAIETQLTAAETELTDRSAAAAAERSAARKKGPTESSEAVRQLKARIKDLRSQRRTAIADAHPTATPRLTAIADAHRAAIKALYADYSQGRGLYWATYNDVVAHHQVATKRVAAERKAGRPANIRHHRYDGSGSITVQLQRQTGAPPRLPATIADEQNGPWRNVLYLTPWVDPDTWATLARAEQRRRRLGVVRLDLGNKRHLSIPVLVHRMLPADADITSARLVVRRVAGHRKIELHVTARIKDPVTRSGGPAVALHLGWRREDGGAVRVATWRSTAPVHVPDDLNDLVHADTDHTGTISLPARWWHRVSTQPEMAARRATSLNDIRDQLVAALTDNPLTITADDEDAQPVPTAAAVATWRSPARFAHLARTWATDCPAGHQATAAALENWRRSDRRLWEQQAHGTANTLAARADAYRRTMSWLLTGASRLVLDNTAIADLARRADPATEPTLPTAVTDRVAHQRIGASPGQLRSIATTTANSYGVAVAVMPHTGITRTHYRCGHLNPADDRYSAARIVTCDGCGQHYDQESSATLMLLAASGDVAAPGSATARNPDTSAHA

SEQ ID NO: 2656 - protein, 629 aa, unidentified
  REGION 1..629: note = Description of Unknown: uncultivated organism sequence
  REGION 1..629: note = Category: MG82 effectors
  REGION 1..629: note = Description: MG82-2 effector
MSAAPQERRSARGPDVPQRRASTDPTILVAGEADASPEDSVTVHTMGVHYRWELPKVVRAQLRLAHDLREDLVTLQLDYEQDVRAIWSSYPDVAAAESELQRADDAVAAVNEHISAERVRLRSKKVGADLTKQLAAARAAVKAARQARRDAIAAVRDAAAQRLRARAAALLAGQKLLYRRYCQDNDLYWASYNDVFRHHKTALQRIRRQRLEGKPATLRHHRFDGTGTITVQLQRTAAMPARSPLLLSDPQGRYRNFLVLPWIDPDYWASLTRAQQRAAGRVVVRMRAGTVDGQPQWIDIPVQAHRWLPADAEILNARLTIDRVAARLSTRLNITARIGAPAAADGLAVAVHLGWRDSDRGTRVATWRSTQPLDVADELSDVMLTDDGLTGSIVLPPTISRRLERHAVTAAARAQSFNAVRDKLVSWLDEHGPMAYRDSDISAAEVRRWRSPARLAAVAIAWRDDHTRGEIVAVLEQWRSADRKIWDGQEHGRRRALGYRNDLYRQVGALLASQAARVVVDDINIAAIAGSRRARNDAPAGLQQLIDRRRFHAAPSRLRTAITAAAHRGGLRVDVVAAKGLSRVHAQCGHENPADDRYVSPPVTCEGCGMAYDPNESATLLMLRAVDAL

SEQ ID NO: 2657 - protein, 610 aa, unidentified
  REGION 1..610: note = Description of Unknown: uncultivated organism sequence
  REGION 1..610: note = Category: MG82 effectors
  REGION 1..610: note = Description: MG82-3 effector
MWCVVRVDRLRVTPGNAGFRLLGHARGTPGPSGSARRPGSVGPPVAGAMTAAETVVGAVTVHTMGVHYRWLLPEVLRAQLRLSHSLREDLVTLQLAYEADLRDIWSSYPLVTAAETVLRQAEQAAASATEQVKSERIRLRSKTVSAELTARLSEARDAVTAARQTRRDAIASVKDAAAHRRRDRTALLRADQKQLYRHYCQDDDLYWGTYNDVVHNHRTAVARIQRRRLDGKPAVLRHHRFDGTGTITVQLQRSAAMPPRRPELLCDPAGRYHNHLVLPWIDPRRWTEMSRSEQRRAGRVSVRMRAGSLDGQPQWIDIPVQAHRWLPADAEILTAKLAVTRVAARLSARLIITARIQPPATTPDGPTVAIRLGWRDSVHGTRVASWRSTQPLAIPGRLAHVIAADDRGLTGIITVPQSISQRLERHATTAAARDTALNAIRDKLTSWLHEHGPLPYRDGHLSADEVRRWRSPRPIRGLGHRLARRSPARRHRRRPRGVARRRPQTMGWARTRPPPSAGTPRRSLPPGRRPAHRTGRPGGGRRHQHLRHCPLAPRPRRRGGKSAAGHRPPPLSGRAGQTPRRHRRCGPAHQHSARGHLGQGAVANPCRLWP

SEQ ID NO: 2658 - protein, 390 aa, unidentified
  REGION 1..390: note = Description of Unknown: uncultivated organism sequence
  REGION 1..390: note = Category: MG83 effectors
  REGION 1..390: note = Description: MG83-1 effector
MARSRTYKFLLQPTSQQLAAFECLLRLQRELYNAALEERRGTWKWNQRSVSYFDQTKELTQLRSVRPDILSFGVTVCRGTLMRLDRAFNGFFRRCKSGESPGFPRFKGPGSFVSLQWLDTNGWALDETAGRLRLYGIGNVKAHLHRPIKGTPKTITIRREGRRYWVSIQCVDVPAEPLPATGKSIGIDLGVDFLVATSDGQLIQAPRFGKRGHAGLEKAQRDLATKIPGSKNREKAKQRVATHHRKIANRRRDFAHQTSRRLVNDHDLIVYEDLKITNMTRRPKARPDKQGGYEPNGAKAKTGLNRSIHDAGWGQFTAMTIYKAESAGREVIAVDPRNTSRTCSGCGHASAGNRHGAVFRCLGCGREANADINAAENILRAGRARQLIAA

SEQ ID NO: 2659 - protein, 583 aa, unidentified
  REGION 1..583: note = Description of Unknown: uncultivated organism sequence
  REGION 1..583: note = Category: MG83 effectors
  REGION 1..583: note = Description: MG83-2 effector
MKVVEFKLQLTDDQASKVDTWLNQLRWVWNEALRRVNEERQRYYRKQVNEDGTFGKVEDTGEVWQVWYNKEIKEKAYCCHIADKTRYADYAPCCEIRPYRHQQYANLKELKKWARNAATQKCNPDKPWLKDIPSCFSDFVARDLIKAWEQALSKTNPARYPRFKGNRDTLRSLTDENGHDHLRKDIRGKRNWLVKLNNKLGFMRIIGKHDRFPKDFTVVRICKRASGYYLQVTSKDLEDKTLKRNDRPVGIDVGLKFIVATDQGRVVEPKRYARVAERRLRLLQRKAARRRDAVQKLEGCKGKNLEKVNQQIALLHENIKYRRRQFNHKLSTKLVREYGAIAVEKLQLKNLMRRPEPKLKENGTGYARNNAAAKSGLNKSFADAGLGQLLEMLKTKAEAAGRLFKEVDPSYTSQECSNCHEQVKKSLSTRTHVCPSCGFVEDRDVNAAKNILEKANFSSDYRCWDKREVKPASASSVEGQQESDSGSLDLGKELRAEDALRLTQSQKNNDHLLVEVNSPSKEAVIPTGSGLDEVRLLQQMHVNSETSTPLASEAVIDQVKASTPKPKPRKVKRCLQNQPEAPT

SEQ ID NO: 2660 - protein, 427 aa, unidentified
  REGION 1..427: note = Description of Unknown: uncultivated organism sequence
  REGION 1..427: note = Category: MG84 effectors
  REGION 1..427: note = Description: MG84-1 effector
MNNKVSRYQLLFADEHNELKFKQFNEVMFQLQREMVQIANREVQILWEDMNWSNAVKAKTGVYPTKDEVLERYGSSVRTYIYRTIPQKYNNTSNTSTVLQNVNKRFTQNKKEVMQGKRSIDSYKSTLPIAIHGNSIKIEKIGNKYLVSLSLLSNGYKKQLGIKKGQIIFELMFGRSWSSRQIIDSILSGEFSHTASSITYKNRKWFLNLGYSYPEKEPIKFIDGRTMGIDLGIVKPLVIAFNDNPAHFEVDSDEISEFRKEIHSRRSSLGRQTKHCAESKIGHGVHKRTEGCEKLAQKEANFRDRINHQYSRYVVDLAQKYKCKTIQMEDLTGISKDSTFLKSWPYFDLQTKIEYKAKENGIDVIKINPKFTSQRCSKCGYISEANRPEQAIFQCKKCGFGINADWNAALNISIPGIEKIIKDSEVE

SEQ ID NO: 2661 - protein, 427 aa, unidentified
  REGION 1..427: note = Description of Unknown: uncultivated organism sequence
  REGION 1..427: note = Category: MG84 effectors
  REGION 1..427: note = Description: MG84-2 effector
MNNKVSRYQLLFDDEHNELKFKQFNEVMFQLQREMVQIANREVQILWEDMNWSNAVKAQTGAYPTKDGVLKHYGCPVRTYIYRTIPQEYNNTSNTSTVLQNVNKRFVQNKKEVMQGKRSIDSYKSTFPIAIHGNSIKIEKSGNKYIISLSLLSNGYKKQLGIKKGQITFELMFGRSWSSRQIIDSILSGEFSHTASSVIYKNRKWFLNLGYSFPEKEPIKFIDGRTMGIDLGIVKPLVIAFNDNPAHFEVDSDEISEFRKEIHSRRSSLGRQTKHCAESKIGHGVHKRTESCEKLAQKEANFRDRVNHQYSRYVVNLALKYKCKTIQMEDLTGISKDSTFLKSWPYFDLQTKIEYKAKENGIDVIKINPKFTSQRCSKCGYISEANRPEQAIFQCKKCGFGINADWNAALNISIPGIEKIIKDSEVE

SEQ ID NO: 2662 - protein, 427 aa, unidentified
  REGION 1..427: note = Description of Unknown: uncultivated organism sequence
  REGION 1..427: note = Category: MG84 effectors
  REGION 1..427: note = Description: MG84-3 effector
MNTKVSRYQLLFNDERNELKFKQFNEVMFQLQREMVQVANKATQILWEDMNWSNDVKVQTGSYPTKEEVTGRYGCSVRNFIYRTVPYEYNNTGNIATILQSVNKRFSQNKKEVIQGKRSIDSYKSTLPIAIHGNSIKIEKSGNKYLISLSLLSNGYRKQLGIKKGQIVFELMFGKSWSSKQIIDSIISGEFSHTASSIVYKNRKWFLNLGYSSPDKDSIKFIEGRTMGIDLGIVKPVVMAFNDNPVHFEIDSNEISEFRKQMIARRASIGKQTKYCADSKIGHGVHKRIEGIEKLKQTESNFRDRINHQYSRYIVDIAVKYKCKTIQMEDLSGISKDSTFLKSWPYFDLQTKIEYKAKENGIDVIKINPKFTSQRCSKCGYISEDNRPEQSVFLCKKCGFGLNADWNAALNIATPNIEEIIKNSDTE

SEQ ID NO: 2663 - protein, 431 aa, unidentified
  REGION 1..431: note = Description of Unknown: uncultivated organism sequence
  REGION 1..431: note = Category: MG84 effectors
  REGION 1..431: note = Description: MG84-4 effector
MNTTKVSRYQLLFDDEHNELSFQQANEVLFQLQREMMQIANRTVQLYWEFSGYQSDYKKRFDAYPDKEQLLEDLKYSNLRSYAYAVIAKEFYKNNTGNVATLLQNVDKRYKQNQKDVRLGKHSIDSYKATIPISLHRKSIQISKSKEDYDIRISLLSNVYRKELGVKSGQIYFKLITGKSYSSKQILESILSGKFHYTASSISYRKGKWFLNLGYNFESEELELRPSRVMGIDLGVVKPLVIAYNDTPVHQEIDSNEIQAFRDQMLARRRALGRQTKHCAESNIGHGVKTRTKALEKLKQTEANFRDRINHQYSRYVVDLAVKYKCKTIQMEDLSGISKDDIFLKNWPYYDLQTKIEYKAKEKGIDVVKINPKFTSQRCSKCGYISPENRPDQATFRCKNCGFSLNADWNAALNIAQPGIEEIIRETIKQK

SEQ ID NO: 2664 - protein, 431 aa, unidentified
  REGION 1..431: note = Description of Unknown: uncultivated organism sequence
  REGION 1..431: note = Category: MG84 effectors
  REGION 1..431: note = Description: MG84-5 effector
MNTTKVSRYQLLFDDEHNELSFQQANEVLFQLQREMMQIANRTVQLYWEFSGYQSDYKKRFDAYPDKEQLLEDLKYSNLRSYAYAVIAKEFYKNNTGNVATLLQNVDKRYKQNQKDVRLGKHSIDSYKTTIPISLHRKSIQISKSKEDYDIRISLLSNVYRKELGVKSGQIYFKLITGKSYSSKQILESILSGKFHYTASSISYRKGKWFLNLGYNFESEELELRPSRVMGIDLGVVKPLVIAYNDTPVHQEIDSNEIQAFRDQMLARRRALGRQTKHCAESNIGHGVKTRTKALEKLKQTEANFRDRINHQYSRYVVDLAVKYKCKTIQMEDLSGISKDDIFLKNWPYYDLQTKIEYKAKEKGIDVVKINPKFTSQRCSKCGYISPENRPDQATFQCKKCGFSLNADWNAARNIAQPGIEEIIRETIKQK

SEQ ID NO: 2665 - protein, 431 aa, unidentified
  REGION 1..431: note = Description of Unknown: uncultivated organism sequence
  REGION 1..431: note = Category: MG84 effectors
  REGION 1..431: note = Description: MG84-6 effector
MNTTKVSRYQLLFDDEHNELSFQQANEVLFQLQREMMQIANRTVQLYWEFSGYQSDYKKRFDAYPDKEQLLEDLKYSNLRSYTYAVIAKEFYKNNTGNVATLLQNVDKRYKQNQKDVRLGKRSIDSYKATIPISLHRKSIQISKSKEDYDIRISLLSNVYRKELGVKSGLIYFKLITGKSYSSKQILESILSGKFHYTASSISYRKGKWFLNLGYNFESEEPELRPSRVMGIDLGVVKPLVIAYNDTPVHQEIDSNEIQAFRDQMLARRRALGRQTKHCAESNIGHGVKTRTKALEKLKQTEANFRDRINHQYSRYVVDLAVKYKCKTIQMEDLSGISKDDIFLKNWPYYDLQTKIEYKAKEKGIDVVKINPKFTSQRCSKCGYISPENRPDQATFQCKKCGFSLNADWNAARNIAQPGIEEIIRETIKQK

SEQ ID NO: 2666 - protein, 431 aa, unidentified
  REGION 1..431: note = Description of Unknown: uncultivated organism sequence
  REGION 1..431: note = Category: MG84 effectors
  REGION 1..431: note = Description: MG84-7 effector
MNTTKVSRYQLLFDDEHNELSFQQANEVLFQLQREMMQIANRTVQLYWEFSGYQSDYKKRFDAYPDKEQLLEDLKYSNLRSYTYAVIAKEFYKNNTGNVSLLQQNVDKRYKQNRKDVQMGKRSIDSYKATIPIALQRKSILISKEGANFCVRISLLSNAYRKELGVKNGTLSFKLLFGKSYSAEQILEDIFAGKFKHTSSSISYRKGKWFLNLGYNFESEEPELRPSRVMGIDLGVVKPLVIAYNDTPVHQEIDSNEIQAFRNQMLARRRALGRQTKHCAESNIGHGVKTRTKALEKLKQTEANFRDRINHQYSRYVVDLAVKYKCKTIQMEDLSGISKDDIFLKNWPYYDLQTKIEYKAKEKGIDVVKINPKFTSQRCSKCGYISPENRPDQATFRCKKCSFTLNADWNAALNIAQPGIEEIIRETIKQK

SEQ ID NO: 2667 - protein, 431 aa, unidentified
  REGION 1..431: note = Description of Unknown: uncultivated organism sequence
  REGION 1..431: note = Category: MG84 effectors
  REGION 1..431: note = Description: MG84-8 effector
MNTTKVSRYQLLFDDEHNELSFQQANEVLFQLQREMMQIANRTVQLYWEFSGYQSDYKKRFDAYPDKEQLLEDLKYSNLRSYTYAVIAKEFYKNNTGNVSLLQQNVDKRYKQNRKDVQMGKRSIDSYKATIPIALQRKSILISKEGANFCVRISLLSNAYRKELGVKNGTLSFKLLFGKSYSAEQILEDIFAGKFKHTSSSISYRKGKWFLNLGYNFESEEPELRPSRVMGIDLGVVKPLVIAYNDTPVHQEIDSNEIQAFRNQMLARRRALGRQTKHCAESNIGHGVKTRTKALEKLKQTEANFRDRINHQYSRYVVDLAVKYKCKTIQMEDLSGISKDDIFLKNWPYYDLQTKIEYKAKEKGIDVVKINPKFTSQRCSKCGYISPENRPDQATFRCKKCSFTLNADWNAARNIAQPGIEEIIRETIKQK

SEQ ID NO: 2668 - protein, 431 aa, unidentified
  REGION 1..431: note = Description of Unknown: uncultivated organism sequence
  REGION 1..431: note = Category: MG84 effectors
  REGION 1..431: note = Description: MG84-9 effector
MNTTKVSRYQLLFDDEHNELSFRQANEVLFQLQREMMQIANRTVQLYWEFSGYQSDYKKRFDVYPDKEQLLEDLKYSNLRSYTYAVIAKEFYKNNTGNVSLLQQNVDKRYKQNRKDVQMGKRSIDSYKATVPIALQRKSILISKEGANFCVRISLLSNAYRKELGVKNGTLSFKLLFGKSYSAEQILEDIFAGKFKHTSSSISYRKGKWFLNLGYNFESEEPELRPSRVMGIDLGVVKPLVIAYNDTPVHQEIDSNEIQAFRNQMLARRRALGRQTKHCAESNIGHGVKTRTKALEKLKQTEANFRDRINHQYSRYVVDLAVKYKCKTIQMEDLSGISKDDIFLKNWPYYDLQTKIEYKAKEKGIDVVKINPKFTSQRCSKCGYISPENRPDQATFRCKKCSFTLNADWNAALNIAQPGIEEIIRETIKQK

SEQ ID NO: 2669 - protein, 431 aa, unidentified
  REGION 1..431: note = Description of Unknown: uncultivated organism sequence
  REGION 1..431: note = Category: MG84 effectors
  REGION 1..431: note = Description: MG84-10 effector
MNTTKVSRYQLLFDDEHNELSFRQANEVLFQLQREMMQIANRTVQLYWEFSGYQSDYKKRFDVYPDKEQLLEDLKYSNLRSYTYAVIAKEFYKNNTGNVSLLQQNVDKRYKQNRKDVQMGKRSIDSYKATVPIALQRKSILISKEGANFCVRISLLSNAYRKELGVKNGTLSFKLLFGKSYSAEQILEDIFAGKFKHTSSSISYRKGKWFLNLGYNFESEEPELRPSRVMGIDLGVVKPLVIAYNDTPVHQEIDSNEIQAFRNQMLARRRALGRQTKHCAESNIGHGVKTRTKALEKLKQTEANFRDRINHQYSRYVVDLAVKYKCKTIQMEDLSGISKDDIFLKNWPYYDLQTKIEYKAKEKGIDVVKINPKFTSQRCSKCGYISPENRPDQATFRCKKCSFTLNADWNAARNIAQPGIEEIIRETIKQK

SEQ ID NO: 2670 - protein, 438 aa, unidentified
  REGION 1..438: note = Description of Unknown: uncultivated organism sequence
  REGION 1..438: note = Category: MG84 effectors
  REGION 1..438: note = Description: MG84-11 effector
MNTTKVSRYQLLFDDENNELTFKQSNEVLFQLQKEMMQMANRMVQLYWEFSGYQSDYKKQFDAYPDKEKLLEDLKYSNIRSYIYDVLSKEFNKNNTGNVATLQQLVDKRYKQNRKEVQQGKRSIDSYKATIPISLHKGSIRLLKENGDYYAWLSLLSNEYKKELGIKKGRMRFKLLMGKSYSSMQILDSILSGEFHHTSSSLGYRNGKWFLSLGYQFEAKEPKLRESRVMGIDLGVVKPLVIAYNDMPLHHEIDSNEIQVFRDQMHARRRALGRQTKYCAESNIGHGVKTRTKALEKLKQAEANFRDRINHQYSRYVVNLAVKYGCKTIQMEDLTGISKKDTFLKNWPYYDLQTKIEYKARENGIDVVKINPRFTSQRCSKCGFISPENRPDQATFQCKKCGFGINADRNAATNIAQPGIEKIIQETIKQMSAKGKSS

SEQ ID NO: 2671 - protein, 438 aa, unidentified
  REGION 1..438: note = Description of Unknown: uncultivated organism sequence
  REGION 1..438: note = Category: MG84 effectors
  REGION 1..438: note = Description: MG84-12 effector
MNTTKVSRYQLLFDDENNELTFKQSNEVLFQLQKEMMQMANRMVQLYWEFSGYQSDYKKQFDAYPDKEKLLEDLKYSNIRSYIYDVLSKEFNKNNTGNVATLQQLVDKRYKQNRKEVQQGKRSIDSYKATIPISLHKGSIRLLKENGDYYVWLSLLSNEYKKELGIKKGRMRFKLLMGKSYSSMQILDSILSGEFHHTSSSLGYRNGKWFLNLGYQFEAKEPKLRESRVMGIDLGVVKPLVIAYNDMPLHHEIDSNEIQVFRDQMHARRRALGRQTKYCAESNIGHGVKTRTKALEKLKQAEANFRDRINHQYSRYVVNLAVKYGCKTIQMEDLTGISKEDTFLKNWPYYDLQTKIEYKARENGIDVVKINPRFTSQRCSKCGFISPENRPDQETVRCKKCGFGINADWNAATNIAQPGIEKIIQETIKQMSAKGKSS

SEQ ID NO: 2672 - protein, 438 aa, unidentified
  REGION 1..438: note = Description of Unknown: uncultivated organism sequence
  REGION 1..438: note = Category: MG84 effectors
  REGION 1..438: note = Description: MG84-13 effector
MNTTKVSRYQLLFDDENNELTFKQSNEVLFQLQKEMMQMANRMVQLYWEFSGYQSDYKKQFDAYPDKEKLLEDLKYSNIRSYVYDVLSKEFNKNNTANVSALQQLVDKRYKQNRKEVQQGKRSIDSYKATIPISLHKGSIRLLKENGDYYIWLSLLSNEYKKELGIKIGRMRFKLLMGESYSSMQILDSILSGEFHHTSSSLGYRDGKWSLNLGYQFEAKEPKLRESRVMGIDLGVVKPLVIAYNDMPPHHEIDSNEIQAFRDQMHARRRALGRQTKYCAESNIGHGVKTRTKALEKLKQAEANFRDRINHQYSRYVVNLAVKYGCKTIQMEDLTGISKKDTFLKNWPYYDLQTKIEYKARENGIDVVKINPRFTSQRCSKCGFISPENRPDQATFQCKKCGFGINADRNAATNIAQPGIEKIIQETIKQMSAKGKSS

SEQ ID NO: 2673 - protein, 438 aa, unidentified
  REGION 1..438: note = Description of Unknown: uncultivated organism sequence
  REGION 1..438: note = Category: MG84 effectors
  REGION 1..438: note = Description: MG84-14 effector
MNTTKVSRYQLLFDDENNELTFKQSNEVLFQLQKEMMQMANRMVQLYWEFSGYQSDYKKQFDAYPDKEKLLEDLKYSNIRSYVYDVLSKEFNKNNTGNVSALQQLVDKRYKQNWKEVQQGKRSLDSYKATIPISLHRKNIQLLKENGDYYVWLSLLSNEYKKELGIKKGRMRFKLLMGESYSSMQILDSILSGEFHHTSSSLGYRNGKWFLNLGYQFEAKEPKLRESRVMGIDLGVVKPLVIAYNDMPLHHEIDSNEIQVFRDQMHARRRALGRQTKYCAESNIGHGVKTRTKALEKLKQAEANFRDRINHQYSRYVVNLAVKYGCKTIQMEDLTGISKEDTFLKNWPYYDLQTKIEYKARENGIDVVKINPRFTSQRCSKCGFISPENRPDQETFQCKKCGFGINADWNAATNIAQPGIEKIIQETIKQMSAKGKSS

SEQ ID NO: 2674 - protein, 437 aa, unidentified
  REGION 1..437: note = Description of Unknown: uncultivated organism sequence
  REGION 1..437: note = Category: MG84 effectors
  REGION 1..437: note = Description: MG84-15 effector
MSNILSMPVKVMRYQIVKPVDADWELLGKVLRDLQDDTRKVLNKVIQLCWEWQGFSAEYKQQYGIYPKTSDFSHYKNIDGYCYKKISDFFTRLHTGNLSMTIKRGVQRWKTDLAEVIKGSKSIASFRSNCPIDIHNKSINIFNVEKEYYAKLSLLSKTYKKELSRDLGQITVLINPGDKSGKDILDRCISGEYKISSSQILQKKDTNTSKNNKWLLNLSYSFKSQKKIVDSNKVLGIDMGIIFPVYMAIHGTLIRDKIDGGEIEHFRKEVENRKIKLQRQGKYCGQGRIGHGTKTRVRPIEFAKEKIANFRNTVNHKYSRYIVDFALRNRCGIIQMEKLEGINKDKTFLKSWPYYDLQQKIIYKANEAGITGKFIDPRYTSQRCSKCGYIDEENRPEQKTFICKSCGFETNADYNAALNIANPDIENLIKKELSREA

SEQ ID NO: 2675 - protein, 437 aa, unidentified
  REGION 1..437: note = Description of Unknown: uncultivated organism sequence
  REGION 1..437: note = Category: MG84 effectors
  REGION 1..437: note = Description: MG84-16 effector
MSNILSMPVKVMRYQIVKPVDADWELLGKVLRDLQDDTRKVLNKVIQLCWEWQGFSAEYKQQYGIYPKTSDFSHYKNIDGYCYKKISDFFTRLHTGNLSMTIKRGVQRWKTDLAEVIKGSKSIASFRSNCPIDIHNKSINIFNVEKEYYAKLSLLSKTYKKELSRDLGQITVLINPGDKSGKDILDRCISGEYKISSSQILQKKDTNTSKNNKWLLNLSYSFKSQKKIVDSNKVLGIDMGIIFPVYMAIHGTLIRDKIDGGEIEHFRKEVENRKIKLQRQGKYCGQGRIGHGTKTRVRPIEFAKEKIANFRNTVNHKYSRYIVDFALRNRCGIIQMEKLEGINKDKTFLKSWPYYDLQQKIIYKANEAGITVKFIDPRYTSQRCSKCGYIDEENRPEQKTFICKSCGFETNADYNAALNIADPDIENLIKKELSREA

SEQ ID NO: 2676 - protein, 377 aa, unidentified
  REGION 1..377: note = Description of Unknown: uncultivated organism sequence
  REGION 1..377: note = Category: MG84 effectors
  REGION 1..377: note = Description: MG84-17 effector
NWSNAVRAKTGVYPTKDEVLERYGSSVRTYIYRTIPQEYNNTSNTSTVLQNVNKHFTQNKKEVMQGKRSVDSYKSTLPIALHGNSIKIEKSGNKYLISLSLLSNGYKKQLGVKRGQITFELMFGRSWSSRQIVDSILSGEFSHTASSIIYKNRKWFLNLGYSYPEKEPIKFIDGRTMGIDLGIVKPLVIAFNDNPAHFEVDSDEISEFRKEIHSRRSSLGRQTKHCAESKIGHGVHKRIEGCEKLAQKEANFRDRVNYQYSRYVVDLALKYKCKTIQMEDLTGISKDSTFLKSWPYFDLQTKIEYKAKENGIDVIKINPKFTSQRCSKCGYISEANRPEQAIFQCKKCGFGINADWNAALNISIPGIEKIIKDSKVE

SEQ ID NO: 2677 - protein, 398 aa, unidentified
  REGION 1..398: note = Description of Unknown: uncultivated organism sequence
  REGION 1..398: note = Category: MG84 effectors
  REGION 1..398: note = Description: MG84-18 effector
REMMQIANRTVQLYWEFSGYQSDYKKRFDAYPDKEQLLEDLKYSNLRSYTYAVIAKEFYKNNTGNVATLLQNVDKRYKQNQKDVRLGKRSIDSYKATIPISLHRKSIQISKSKEDYDIRISLLSNVYRKELGVKSGLIYFKLITGKSYSSKQILESILSGEFHYTASSISYRKGKWFLNLGYNFESEEPELRPSRVMGIDLGVVKPLVIAYNDTPVHQEIDSNEIQAFRNQMLDRRRALGRQTKHCAESNIGHGVKTRTKALEKLKQTEANFRDRINHQYSRYVVDLAVKYKCKTIQMEDLSGISKDDIFLKNWPYYDLQTKIEYKAKEKGIDVVKINPKFTSQRCSKCGYISPENRPDQATFQCKKCGFSLNADWNAALNIAQPGIEEIIRETIKQK

SEQ ID NO: 2678 - protein, 640 aa, unidentified
  REGION 1..640: note = Description of Unknown: uncultivated organism sequence
  REGION 1..640: note = Category: MG85 effectors
  REGION 1..640: note = Description: MG85-1 effector
MCTIKCMSQITIQCRFISSESTRHRIWELMAEKNTPLINELLEQVGQHPEFETWRQKGKLPSGIVSKLCQPLKKEERFIGQPSRLYISAIHVVDYIYKSWLALQLRLQRKLEGQTRWLEMLKSDSELIEVTGCSLDAIRTRAAEILAQSASQSDPVTRQQTQDKKKKKFKAKNSNTSLSNTLFEIYRNTEDILTRSYISYLLKNGCKVSDKEEDAEKFAKRRRKVEIRVERLQEQLKSRMPKGRDLTSDHWLETLVIATHNVPKNEDEAKSWQASLLRKSSSVPFPLVYETNTDLTWFKNQKGRICVNFSGLSEHTFEIYCDSRQLHWFKRFLEDQQIKHDSKNQHSSSLFTLRSARLNWQEGEGKGEPWNVHRLTFYCTVDTRLWTNEGTEQVREEKAFEIARTLTRMKEKGDINKNQQAFVKRKHSTLARINNPYPRPSQPLYKGQSHILVGVSLGLDKPATVAVVDATTGEVFTYQSIRQLLGDNYKLLNRERKQQQSKSHQRHKAQKSAAPNSFGESELGQYVDRLLAKAIVAIAQTYQASSIVLPKIGDMREIVQSEIQARAEAKCSVIEGQKKYAKQYRCSVHKWSYGRLIESIQSQAAKTGIAIEEGQQPIRGSPQEQARELAIIAYKSRKLL

SEQ ID NO: 2679 - protein, 467 aa, unidentified
  REGION 1..467: note = Description of Unknown: uncultivated organism sequence
  REGION 1..467: note = Category: MG85 effectors
  REGION 1..467: note = Description: MG85-2 effector
MFPSFCSPPFLSYFSTPLNGYNRCAISYLLKNGCKINDKEENPEKFAQRRRKLEIQIQRLTEKLAARIPKGRDLTDTQWLEALFTATQTVPENETEAKFWQNSLLKKSSSVPFPVAYETNEDLVWVKNQFGRICIKFSGLSEHTFQIYCDSRQLHWFQRLLEDQKIKKNSKNQHSSALFTLRSGRISWQEGEDKGDPWNVHHLTLYCSVDTRLWTEEGTNLVKEEKAEEIAKTITQTQAKGDLNDNQQAHIKRKNSSLARINNPFPRPSQPLYQGQSHILVGVSLGLENPATIAIVDGTTSKVLTYRNIKQILGDNYKLLNKQRQQKHLLSHQRHIAQRMAASNEFGDSELGEYIDRLLAKEIIAIAQTYKAGSIVLPKLGDMREQVQSEIKAKAEQKSDLVEVQQKYAKQYRVSVHQWSYGRLIANIQCQANKAGIVIEEAKQPIRGSPQEKAKELAINAYQSRKA

SEQ ID NO: 2680 - protein, 641 aa, unidentified
  REGION 1..641: note = Description of Unknown: uncultivated organism sequence
  REGION 1..641: note = Category: MG85 effectors
  REGION 1..641: note = Description: MG85-3 effector
MSVITIQCRLVAKEFSLRYLWELMAQKNTPLVNELLQAIVQHSDFESWLQKGSIPQATIKALCDSLKNDPRFSGQPGCFYTSATSLVSYNYKSWFALQKRRQQKIEGKERWLNLLKSERELEEECDRTLEEIRAKATQILTQFQPQAENAETPPGEATQKKKGKKSKSTPSKGKAASLFNTLFNAYAQTKDPLERCALAYLLKNNGEVSLVEEDLEAYQQRRRKKEIEIERLKEQLKSRHPKGRDLTAEKWLETLEAARTQQPESEAEAATWQANLLRNSSPVPFPVNYETNEDLTWFKNEAGRICVFFSGLREHHFEVWCDNRQLHWFERFFQDQQIKRQSKNQHSSSLFTLRSGRIGWQECTGEGEAWNIHHLKLYCTLDTRLWTAEGTEQVAQEKAAEISNILTKTKQKDDLNEKQLAFIKRGETMLARINTPFPRPSKPLYQGQSEIVVGVSLGLEKPATVAVIDVPGDRVLAYRNVKQLLGDHYPLLNRRRQQQRSLSQKRQKAQKQGAANEFGESELGQYIDRLLAKEIVAIARSYQAGSIALPKLTDIREILHSEMQTRVEKKIPGYKEAQDKYAKQYRVNVHRWSYGRLMDAIASQAAKVGIVIEVGKHPSEGSFQDKAREVAISAYCDRSVN

SEQ ID NO: 2681 - protein, 669 aa, unidentified
  REGION 1..669: note = Description of Unknown: uncultivated organism sequence
  REGION 1..669: note = Category: MG90 effectors
  REGION 1..669: note = Description: MG90-1 effector
MLVAKFGVRKFLTGESLALAEMRAAAQYYQSLVTIERWRRSQFAAIRSETVPGLGEIDEAYQQLDEWIGEHAGKGGKRGGIREKRRKATAATGRPVKPVKKAVDVSDEVDLITELKAWRKAAAELAKPMRGQFAAVVEPAQQEFTARSARLRSAWGSNDGDRHAKRRSDIQARDEMLAEAQWPEAWRRLAQLETQADALRGWIKEARLLSVGTYHSIQRVDLPAACKRPKPRPDGEPRRPKRRPTYSRRRLRRIGWEINDATWGDLLAGKNNELRITDVRNQGGANGGRVKQRATVHMRVRAETREALAAAPDYYRPKYDGPAGNWWVTMDVVLHRPIPPDTKVRWAYLVPSEESPGRWEYSLQFTLDPTEPLIQRAPGTGTVNVRLCWTQDNENKTLIVAHVNGEPLRLPGGAHERGRRAGVVESLRFAERLRSVADTLFDSARAEVAKRIASQPTRVFEAAHGLSQWRAHWKLKRVSAVMLEVLDKREEEYAMWKRWRDLRRAAHEDLFEPDIGKYAAILGLTTPDTIFTFWLAMWRRKDEHLEAMAAGARNHAMGRRRDFYRVTAAKLCTQFEICEVSGAVDLDQIALRDKAEDKPNELHQAARHNRQLACVHELKAALKAAFGPDRYKERDQSGAAKKAAAARDAANDVETNANTDEGPTVSAAE

SEQ ID NO: 2682 - protein, 716 aa, unidentified
  REGION 1..716: note = Description of Unknown: uncultivated organism sequence
  REGION 1..716: note = Category: MG90 effectors
  REGION 1..716: note = Description: MG90-2 effector
MSVDDPPLRSRARVLVYSYFCKPATEADEHALCEQLRLAALYRRELVQIENLARALQRAWSATYAESALEEERRRFRRMPPAEPDPVDPDAGSRWAEISAAARAWSDGATAREAGVRSLVALGVSEGLAQATVDQAKIASERSRAFNSVRRHFSQDLGLTWGTYQHAAEAFESQHRSVSMFDDVRVPPRAAVGCFAVHLQPARALRGSDDAWIRFGSIARLGSDRARGAEIDRSGRPRPARHHQVMLRIGTQADRRPRWVTVLALLDRPVPPTAIVSWAKVCRRRVGPTHRWELQITTQVDEACLVLDPSLAERAVRLWAAGVGKRGIARTLTMRIQDARRCALAALRAGISQGAGALDGQVQEATAALAHPPVPEPARSRGETVGVDIGWRRMGDAMRIARWWGTDGRSGELTIRRQVLDADVKADDLRGIRDQHKNEILAQLLDYTVSLRERSPRIPDADWIVAELPSMRQWRRAARLVGLVGRWRDHRIPGDDSIFEAVLGWLKQDRHLWAWEANQRQKRQRRVDEQIRLFVVWLCRQYGRIGVEAPMVAGLVRKVPRCVACASSPTRCTACSDRERLRRLTSTRVTHAAPARTRQLLETIAPTHGSVVIRLDPAYTTLDCALQDEAGLVCGHRRVEVVDWSPLEIACARCSGTEDQDLTAAKNLARRASGVALDEDGRPLATDSAGRSKASKRKLRPRRNRSGRRVDRSHPT

SEQ ID NO: 2683 - protein, 605 aa, unidentified
  REGION 1..605: note = Description of Unknown: uncultivated organism sequence
  REGION 1..605: note = Category: MG90 effectors
  REGION 1..605: note = Description: MG90-3 effector
MYAQKYGAKKPLEWTERHEQSFLDRRALWNDLVEVYRQARVRERELYSAADPEIESGYAEVDALDLALDAQPRQTDEERAAWRDILAQLKSTRAALWTKIRELKLGAEIKAQIRTIWQETQRATYTLACGKARKYPALHWADCNDLHDSLWKSIRAKKHPRPRTFTSRESLYRQLQSQTVGGVRVEVPDRKRRKIEGGTLTGATWDALTSERGYGGVKIQPYTLRRATRRWALLEFSIDSGATLRIPIRVHREPPKEALIKGVRVVRERIPGRRFPYEWSVVLSVAAEPLRSVIRCPSERTLYAGLGWRHTPEGLRVLAGIDDLGREWHVTLPEEYVLQWRYSRSLEAHLRLLRNAEAARLGVDPRSTRELFEHPDSRRWAYGEHLGEQTHAALLARNCEAAAAAEIFGERAGRARFSGLRSTLLRRRKDLYIRVARQIVGSSTRLVLGALDGADIQERTKDLPLPARHLRTIAAPTRLRDEIEWQARKAGVEVVTLDATNASRYCAVHPDVDLYAGRDESRLWLACEGCGVPLDRDANYARNLFRRDAPERFERCDWQALTRERSRLEIPNITHEVQRHWSTPQPRESRVQYTARLALANRDNC

SEQ ID NO: 2684 - protein, 445 aa, unidentified
  REGION 1..445: note = Description of Unknown: uncultivated organism sequence
  REGION 1..445: note = Category: MG90 effectors
  REGION 1..445: note = Description: MG90-5 effector
MTDAPATVTRTISLEVAKPLNCSWDELRVLLRTQRCIIPQLLRSGMDALIACGVVETKAVHGHVCPDARGTSPATVVYQSMKAELDRIQHGKWRDAARPALNLPAGMLSALARRVTQTYKLRPSFKGHQPIPVRRAELHVEADGDAVVVRVLLMGGGTGPRGGHRLLVRASEGFHWSIARRLAKGELAYGAGSLVFSERKDKWFVRIAYEAPVRVVQGADPSVALVVRRGVHTALMLMGTDGSYRRVPGEKVNAQLHALEARMRAARQIGADELGRGARGHGKRRRYAHYDALHGKRRRVVRTWCQQMGAAVVRQATRIGAGKVVIENFGGFAPDKSVAFIGSRFPFYQLKQSILEACEKRAIAVDEVAADYVSTTCPSCSVADARSHNRRTGTFHCLACGLSRPADFVAALNMLRRADVDSSTWDERMDQYKRLVESLKEQAAE

SEQ ID NO: 2685 - protein, 516 aa, unidentified
  REGION 1..516: note = Description of Unknown: uncultivated organism sequence
  REGION 1..516: note = Category: MG90 effectors
  REGION 1..516: note = Description: MG90-6 effector
METATEENHVDRVYQFGCRPPPGAEHEIALQLLGQAYLYRDDLRRAYNTQKRHVRMLLESKDAASHAIQFEHEMLKERIRSARASRGHLLDAGTYWLIEKAMLAASKANKLDPIRAQEWDGTGRIGAAIQSSAQFPAAAWNHSRVKLSKEDAQQFNTRKGPGSRSHDEDAVLTIFVGEAKAERALHWPVKLHRDFPSGAIVKQVAVQRTRSGHRFRWKVLITISHERSNERDPEAKGVVGLDVGWRTEGDLGMRVATHDASDDADALRIHTPEALFYADAVDSTRDMLFNEAKEYAFSSGLPGTEHARLWRDKERMRRLARSTQDLGAVWWHERDRHLRDISCAVRLRSIRRRLDAFRSYADSLAKRYRMIALEDMPMIDWVGKGKTAALERLRSIASLSLLQNIIAERFGAERVDWVPAAHTSMVCSSCKVQRELTVGPGPHWVCAACGHEHHQDYNAATNLRLLSEQWIADGKSLRARKRKSKKGNEKKHVNAIATGDALGMTVTARKSIATAA

SEQ ID NO: 2686 - protein, 645 aa, unidentified
  REGION 1..645: note = Description of Unknown: uncultivated organism sequence
  REGION 1..645: note = Category: MG90 effectors
  REGION 1..645: note = Description: MG90-7 effector
MYAQRYGAKAPLEWTEAHARVLLLADQLWDDLRAIWIQCLHEQEMAEDATGDAELLSARGAVSRTEAQVDAAFQARRDWRQRHRSKQAPEEIEASIKAAISAAREARRELWPVLKRVRKEIREELLDLWNARDQQMRVLAQGRTRKYTDLHDGVYNDIFKRFRVAAKEGAKQGIVPRPSHEHLSQSIYRQIQPHNFGGKLVSDPKKPGKRRKRIGGSQKGAEWSTLCTTGCGKVRVLPYSPGPRVTQRWGLLVMPVDANGLEIKIPIRVDDREPPQGAQIKGVRVVRRDRKWHTVFSVDAPPPSIERGAGTLYAGLNWRLMADGSLRVLDGIDETGKRYQVCLPRWQLAAVEYAEALQAATDRRAVQAALQLEADHPKRAKEIAEAVRRRNWAALYPLDTAWADGTHGKQGRRQHTALLRARKIAGGDLAKLTELVAEILGDRAGRRRIAGQKSKNTRRRESFYRECAQAIATRFGRLVVAKSDGRKLAKRVDEETGEESNLPAPARRNRQIAAPYSLMQYLRWAFVRAGSPVVDLEAKHKSHTCPICGQEMQGEASRGELYLSCSEHGMWDRDHALAAALWRDDAAGDHERWSLALSRRERPRAKIVRIDEEIGGSFTEHYHRLQYVSGGALEDKGKSRGATRR

SEQ ID NO: 2687 - protein, 482 aa, unidentified
  REGION 1..482: note = Description of Unknown: uncultivated organism sequence
  REGION 1..482: note = Category: MG90 effectors
  REGION 1..482: note = Description: MG90-9 effector
MKRDSNSPAERSRKAKAAKLARWKAAHPSVSRGLLYRMDPTVELGAGMGRMTDLDRALWNMTHQWWLMSSRPLRRVKKSDLDAVVAQARTDIPWLAELPAQACKAVAKRYWQTWERCWSGVGGAPNFHSRLKDRPSFDIPQARDLNITRVSKKFATVQVPKVGKVTIRYHRPIPVGARVTGARVTNDHGRWTLALRVELPKPELRSPVESRPVVGFDRGVVIPLAGSDGTEFNHPDWLTPGEKRHLRYLERQSARERHARWDRSDGRGKGRIGANERKTYDAIASVQAKAARRRKDWHHQTSRKIADGYSVAVFEALRIKNMTKSAAGSVKAPGTNVAAKSGLNRVILNEGWGTLLDLTRYKMADNGGAVVTVPAPFTSLTCHTCGSTTPGQRKNQALLVCGDTDCGWTGNADFNAACNILMRAVSGGLVPTLSAGIVDDARSRYELEERTDAMPPVGTEAPLKLDGPGKRENRLGQRTVAA

SEQ ID NO: 2688 - protein, 394 aa, unidentified
  REGION 1..394: note = Description of Unknown: uncultivated organism sequence
  REGION 1..394: note = Category: MG90 effectors
  REGION 1..394: note = Description: MG90-10 effector
MEEGSADKGHVTIVYPAYPNVDQERELLRTLGVVRGLYNHFLAESIADIMEGDRFPTPREMNKAITVMRGRDIGLVSVAVFTLRDAPLRVHAAMTSFARLSARSGELRLPRFKSESRYRSLAFDPKGVKFDGRRIVFGKWMKLRCGNLDRNRKLHRPEGGRIVTARIVRKGSGRWYVHITFEVDRRYRSEIDLSDPAEPEAYDLGLCDIITDSKGERIGAPDLYARHENEIARLQRQIASMEDGPKRRKKQRRLSVLHERIRRRRDGYLDEVADRMVSGHSAVILEDLRLRRMIERDNSPAPRRKLFTEAALGTLVRKVEAKAERACIPLVKVDPAYTTRRCSCCGHVGEKMPLSLRVFSCPRCGLEMDRDHNAALNILGSGMGTLRGSAEPSG

SEQ ID NO: 2689 - protein, 391 aa, unidentified
  REGION 1..391: note = Description of Unknown: uncultivated organism sequence
  REGION 1..391: note = Category: MG90 effectors
  REGION 1..391: note = Description: MG90-11 effector
MRRGGGSEDKWFVTRVYPAYPNRTQERELLRQLDVARGVYNHFAEACIHCLIDGTHVPDPMEMNREFTLMRADDCLLRSVNSYTLRETINRVWQAVEKCERRSLADGELHVPRIKTPPRFRSICFDPKSSKIENSRIRLNRELSVRCRNLARPRNGRAVAVRAVRRGTGRWYICITYETDRVVRGEMDVGEPDRAEGYDLGLVDLITDSRGNRVRAPDFFREGEAELAHLRRQLSRLEEGTAKWLKKRRRIARIEERIRRRRDGCLDRIADWMVSGKSVVVVEDIDVRRLASREDGTLVRRKRFTEAAWATLVGKAERKARKTDVRLIRVNPAYTTRTCSRCGHVGDGIPLSERMFRCPVCGLEMDRDRNAARNILGSGMGTQRCTAEPSG

SEQ ID NO: 2690 - protein, 430 aa, unidentified
  REGION 1..430: note = Description of Unknown: uncultivated organism sequence
  REGION 1..430: note = Category: MG90 effectors
  REGION 1..430: note = Description: MG90-12 effector
MSTITFEPPTCAFCGKKAEPNETFCHGNGNIYICTECVDEFHESINAANTFIENARKIQETDNMQKSRLPTPSQLKAHLDEYIIGQDYAKRVISVAVYNHYKMLKIKGQEKAGKTEKTVDLEKSNVLLLGPSGSGKTAIVRAIAKKLKVPFTMTDATLYSAAGYVGMDVECMVRQLVEAANGNIEAAERGIIFIDEIDKTSRKGENLSTTADPGHEGVQQSLLKLLEGNVVNVPEKGRRAHPEADTITVNTENILFIVGGAFEGIEKITAKRLRSENQAGTMGFGSQLVDKKNQQYNEYIEKVSTDDLKKFGMLPELLGRVPVIAPMKELTEDQLVEILHKPKNALTKQYQRLMAQDGVDLQFTDAALRVIARRAVEKKTGARGLRGIMEDILNPVMFETPDRNEDTIIIDANDDDVSITYQTKRRKEAV

SEQ ID NO: 2691 - protein, 402 aa, unidentified
  REGION 1..402: note = Description of Unknown: uncultivated organism sequence
  REGION 1..402: note = Category: MG90 effectors
  REGION 1..402: note = Description: MG90-14 effector
MQTVRYNYRLYPTKTQETVLNRLFGCCRVVYNDTIDFFNNNFNPNNQSKLPTAANASKQILTSAKKTVKRAFLKEVSSVALQQEFRNAWLACLHGVSHTSNQKPAKRKTKKHNPVNSANFTSNGFSINQHGVYISKIGVIKTKWSRPMPSEPTSCTISHARNGRWYASFVVKRPKTPFAQCDNNAGIDMGLTDMATIVNTKGDRWKIANPRNYAKIQDKIGRLQRHLSKQTKGSKRYERTRHQIALLYSKAHDALADYQWKNVLNIIRETQAIGVETLDIKSMTAKHGKSVRDASMRSFLNKLGSKADEHCRVIIRLNQWLVTTKVCALCKHKLKVGLPEYARHWVCPKCGAHLDRDYNAALNILDAAGLAGSLNARGGSVISFLASAENGCSRRTAYHPNF

SEQ ID NO: 2692 - protein, 533 aa, unidentified
  REGION 1..533: note = Description of Unknown: uncultivated organism sequence
  REGION 1..533: note = Category: MG90 effectors
  REGION 1..533: note = Description: MG90-15 effector
MANVLNYKYGIFPTAPQRKHLTRRMRECRLQYNRAVSTRKRLKGSLMCYKTLPVLHEVMGLEKDNTNPNRRTAIEKVGAAYPNIPKDKWSRIYDLKTIFGKTFDIKKRHCDLKVLAAECDALLRAELTEFRAHFRQPESTRPARPPKRPVYFKLLQAASRHAGYEAKIHMDRAFGSRLGISRIRFSVSGCSGGTVANFERACDPSPDQRRIGASGEPNYKRRVDAYGYQVFRNEDILTGNKIKIRGLPTGMDEVEINLHRPLPDGHKLKRVAVMERGGQWQVVMTLEVTDETYQLVPSCPRKAIGLDPGTATALTSAVLDRDTGSIEYGAWDWSPLDAAEDKMEAISQKLSGMQGPDRRTGQRASNRWKKLNARRRRLHATIARRRLDMHHKISRELVNHGLVAIGNWEPPKVVKGRKEFRKGKTKAVEAGPKGIKAKRRGGRDRGIATLRSLAAQKGVRAGVEVIASADERYTTQQCSKCKELTGPKQDLSTRKWTCSKCGSEHDRDQNAALNILNLALEASAKMGTQSLEK

SEQ ID NO: 2693 - protein, 533 aa, unidentified
  REGION 1..533: note = Description of Unknown: uncultivated organism sequence
  REGION 1..533: note = Category: MG90 effectors
  REGION 1..533: note = Description: MG90-16 effector
MANVLNYKYGIFPTAPQRKHLTRRMRECRLQYNRAVSTRKRLKGSLMCYKTLPVLHEVMGLEKDNTNPNRRTAIEKVGAAYPNIPKDKWSRIYDLKTIFGKTFDIKKRHCDLKVLAAECDALLRAELTEFRAHFRQPESTRPARPPKRPVYFKLLQAASRHAGYEAKIHMDRAFGSRLGISRIRFSVSGCSGGTVANFERACDPSPDQRRIGASGEPNYKRRVDAYGYQVFRNEDILTGNKIKIRGLPTGMDEVEINLHRPLPDGHKLKRVAVMERGGQWQVVMTLEVTDETYQLVPSCPRKAIGLDPGTATALTSAVLDRDTGSIEYGAWDWSPLDAAEDKMEAISQKLSGMQGPDRRTGQRASNRWKKLNARRRRLHATIARRRLDMHHKISRELVNHGLVAIGNWEPPKVVKGRKEFRKGKTKAVEAGPKGIKAKRRGGRDRGIATLRSLAAQKGVRAGVEVIASADERYTTQQCSKCKELTGPKQDLSTRKWTCSKCGSEHDRDQNAARNILDLALEASAKMGTQSLEK

SEQ ID NO: 2694 - protein, 394 aa, unidentified
  REGION 1..394: note = Description of Unknown: uncultivated organism sequence
  REGION 1..394: note = Category: MG90 effectors
  REGION 1..394: note = Description: MG90-17 effector
MEEGSADKGHVTIVYPAYPNVGQERELLRTLGVVRGLYNHFLAESIADVIEGDRFPTPREMNKAITVMRGRDIGLGSVAVFTLRDAPLRVHAAMTSFAKLSARSGELRLPRFKSESRYRSLAFDPKGVKFDGRRIVFGKWMKLRCGNLDRNRKLHRPEGGRIVTARIVRKGSGRWYVHITFEVDRRYRSEIDLSDPAEPEAYDLGLCDIITDSKGERIGAPDLYARHENEIARLQRQIASMEDGPNRRKKQRRLSVLHERIRRRRDGYLDEVADRMVSGHSAVILEDLRLRRMIERDDSPAPRRKLFTEAALGTLVRKVEAKAERACIPLVKVDPAYTTRRCSCCGHVGEKMPLSLRVFSCPRCGLEMDRDHNAALNILGSGMGTLQGSAEPSG

SEQ ID NO: 2695 - protein, 394 aa, unidentified
  REGION 1..394: note = Description of Unknown: uncultivated organism sequence
  REGION 1..394: note = Category: MG90 effectors
  REGION 1..394: note = Description: MG90-18 effector
MEEGTADKGHVTIVYPAYPNSSQERELLRTLGVVRGLYNHFLAESIADVMEGDRFPTPREMNKAITVMSGQDAVLRSVSVFTLRDAPLRVHAAMTRFARLSARSGELRLPRFKSESRYRSLAFDPRSVRFDGRRIVFGKWIKLRCGNLDRGRSLHIPEGGRIVAARIVRKGSGRWYVHITFEVDRRYRSEIDLSDPAEPEAYDLGLCDIITDSKGEKIEAPDLYARHENEIARLQRQIASMEDEPGRREKQRRLSVLHERIRRRRDGYLDQVANHMVSGHSAVILEDLRLRRMIERDDSPAPRRKLFTEAALGTLVRKVEAKAERACIPLVKVDPAYTTRRCSCCGHVGDKMPLSLRVFSCPRCGLEMDRDHNAALNILGSGMGTLRESAEPSG

SEQ ID NO: 2696 - protein, 427 aa, unidentified
  REGION 1..427: note = Description of Unknown: uncultivated organism sequence
  REGION 1..427: note = Category: MG90 effectors
  REGION 1..427: note = Description: MG90-19 effector
MEQKKNICSVCGKPYDSHLFFFTHDKEDMCICFDCVEKIYGRIQQDKERYPATENIDETRPPAKKNGRIKPSDIKAYLDQYIIGQDKAKQVLAVAICNHYKMYRLKKNGAVDSIHKEMEKSNVLIVGPSGCGKTAVVKRLGKFLQVPVITVDITAYSAAGYVGKDVETILRDLWIAAEGDISLAEKGIVYIDEVDKISRKGENLSTTTDPGHEEVQQGLLKMLEGNTIDVPKRGNREHPQAETIKINTENILFILGGAFEGIEKIIAQRHKRKSGGSIGIGAVIEDMDDEQTFNKNILDIRTEDLKKFGMLPEFLGRIPVICPMQELTEEALVNILTKPKNAIVKQFQALLADDDIELEFTDKALNKIAQQAIERKTGARSLRGVMEDIMNPVMFRIPDEEGLNKVVVDVDKDDNFDIKEIKEENAA

SEQ ID NO: 2697 - protein, 370 aa, unidentified
  REGION 1..370: note = Description of Unknown: uncultivated organism sequence
  REGION 1..370: note = Category: MG90 effectors
  REGION 1..370: note = Description: MG90-20 effector
MQAVDGLDINILTPAEIKNGLDQYVIGQDEAKRVLAVSVYNHYKRILSGKGADVELQKSNVLLLGPSGVGKTLLAQTLAKMLGVPFAIADATTLTEAGYVGEDVENILLKLLQAADFDVQKAQVGIIYIDEIDKITRKSENPSITRDVGGEGVQQALLKILEGTVSNVPPNGGRKHPQQEFIQIDTTNILFICGGAFDGLDKYILRRTDRSALGFGSSLKDNSEDAQRALLRKVEPHDLVKFGLIPELIGRLPVITVLDDLDEDALVRVLKEPRNSLVKQYKELLSMDSVELEFTDEALHAIARKTIERKTGARGLRSVMEGILLPVMYDVPNDPTIIRVTIDKDTVEGGEAHLEYGAVRKRYKNQTALS

SEQ ID NO: 2698 - protein, 408 aa, unidentified
  REGION 1..408: note = Description of Unknown: uncultivated organism sequence
  REGION 1..408: note = Category: MG90 effectors
  REGION 1..408: note = Description: MG90-21 effector
MVNKNNEFCCMCGSKEDEVDKLIRGKYGYICDNCISIASDLLNDDEEEKNITNNMQLATPSQIKAHLDQYVIGQDEAKRTLAVAVYNHYKRLKQNKKSDVEIQKSNILMIGSTGSGKTYLAQSLAKFLGVPFAIADATTLTEAGYVGDDVETMLRTLLQNANYNIESAQRGIIYIDEIDKISRKGENMSITRDVSGEGVQQALLKIIEGTISEVPVTGGRKHPQGETVKINTSNILFICGGAFDGIEKIIGKEEIHNSIGFGANITDKKESVADLSKVEQHDLVKYGLMPELIGRLPIITTLNPLSEDDLVHILTEPKNAITKQYQELLAMDGVKLEFEDEALRKIAELAIQKKSGARGLRSIIESAMQKVMFDVPDMSSAKKVVITAECVEGKADALVYGARNKKIA

SEQ ID NO: 2699 - protein, 366 aa, unidentified
  REGION 1..366: note = Description of Unknown: uncultivated organism sequence
  REGION 1..366: note = Category: MG90 effectors
  REGION 1..366: note = Description: MG90-22 effector
MRNRGGPWNICGKFPPEIKKFLDEYVIGQEYAKKVISVAVYNHYQRITAPRTAPQLDKSNILLIGPTGVGKTLIAETLARFLKVPFAIADATPLTEAGYVGEDVENILLRLLQAADGNIQLAEIGIVYIDEIDKIGRKSESPSITRDVSGEGVQQALLKILEGTVANVPPQGGRKHPGQQFLQVNTRNILFICGGTFEGLDKIIERRICSGTIGFAANITRTHPENEDELLRCVQPDDLIKYGMIPEFVGRLPVIAPLHSLSQSALIDILTQPKNALLKQYAYYFEREGVKLTFTPEALAAVAERALQLRTGARGLRAVLEETMLEIMFELPTRHNIIECIITPEVIRKEKPPVYIHGRRTVRRTH

SEQ ID NO: 2700 - protein, 412 aa, unidentified
  REGION 1..412: note = Description of Unknown: uncultivated organism sequence
  REGION 1..412: note = Category: MG90 effectors
  REGION 1..412: note = Description: MG90-23 effector
MFETKIPIRRCSFCGKGQNEVEALITGPNGVAICNVCVDECYEMIHQKEGEKGKSPVEIGKLPTPKEIKEFLDQYVIGQEEAKKVLSVAVYNHYKRIISREKGEDEVELEKSNILLIGPTGSGKTLLARSLAKLLDVPFAIADATTLTEAGYVGEDVENILLRLIQAADYDIEKAERGIIYIDEIDKISRKSENPSITRDVSGEGVQQALLKILEGTIANVPPQGGRKHPHQQYIQIDTSNILFICGGAFVGLEEIIARRIGKGTMGFTADVDKIKMDRDQLLKYVEPDDLVKFGLIPELIGRLPVVATLSELKEEDLVRILKEPKNALVKQYQKLLELEGVELVFTDDALREIAREAIRRKTGARGLRAIMEKIMMDVMFEVPHRKEIKKVIIDKKAVKTGKPKYEVAKAS

SEQ ID NO: 2701 - protein, 427 aa, unidentified
  REGION 1..427: note = Description of Unknown: uncultivated organism sequence
  REGION 1..427: note = Category: MG90 effectors
  REGION 1..427: note = Description: MG90-24 effector
MAKNDEKLIRCSFCGKREDEVDRIVRGLDAFICNECVKLCGEIMGFDYEEPEYTVEQYEGDLPFQEIPKPREIKEYLDEYIIGQDEAKKAISVAVYNHYKRILAEDQGDTELQKSNVLLIGPTGSGKTLFAQTLAKLLKVPFAIADATTLTEAGYVGDDVENILLRLLQAADFNVPLAEHGIIYIDELDKIARKSENTSITRDVSGEGVQQALLKILEGTVAGVPPLGGRKHPQQEFIQVNTKNILFICGGAFDGIEKIIEQRLDKKSMGFGADIKSKRERAAGEIMLSVRSHDLQKFGIIPELIGRMPVIVPMKQLTRDDLVRILKEPKNAITKQYKALMKYDGVTLEFEEGALEAIADRAIELDIGARGLRSVVESIMTDVMYDVPSQDRIEKVIITEASVREGTGPKLVRRPKPRIDPDLALNL

SEQ ID NO: 2702 - protein, 442 aa, unidentified
  REGION 1..442: note = Description of Unknown: uncultivated organism sequence
  REGION 1..442: note = Category: MG90 effectors
  REGION 1..442: note = Description: MG90-25 effector
MARNDQMRLRCSFCGKTQDQVDKLISGMNDTFICDECVELCAELVNDDLELRAAQKRQRAQKNAKPLPKPQEIKATLDEYVIGQDRAKITLSVAVYNHYKRIFCGDQTDVELQKSNVLLLGPTGVGKTMLAQTLARTLDVPFAVADATTLTEAGYVGEDVENILLRLIQAAEFDVERAETGIIYIDEIDKIARKSENPSITRDVSGEGVQQALLKILEGTVSNVPPQGGRKHPQQEFIQVDTSNILFICGGAFDGIEKIVEKRSGNGGLGFGAEIKSTKELELTEAMQNVIPQDLVKYGLIPELVGRIPVLTTLDDLDEDALVRILKEPKNSLVKQYQELFRMDNVELELDDAALRAIAKETLEKKTGARGLRGVMERVLQPLMYESPSDYRIEKITITEDYVLGNSEPLLVRNEAREQPAPLLVAPASAAPQRRNRRGNVS

SEQ ID NO: 2703 - protein, 405 aa, unidentified
  REGION 1..405: note = Description of Unknown: uncultivated organism sequence
  REGION 1..405: note = Category: MG90 effectors
  REGION 1..405: note = Description: MG90-26 effector
MLIQGPDAYICDECVENCRSIIEGGESSKRRQSNRRTPSPRVLPKPQEIKAQLDEYVIGQDEAKIALSVAVYNHYKRIYRRHRVDVELVKSNILLLGPTGVGKTLLAQTLAKTLDVPFAIADATTLTEAGYVGEDVENILLRLIQAADYDVEKAQRGIIYVDEIDKIARKSENPSITRDVSGEGVQQALLKILEGTVANVPPQGGRKHPQQEFIQIDTSNILFICGGAFDGIEKIVEKRLGNKVLGFGSELQSKSEFEADTVMTKVIPADLVKFGLIPELVGRMPVLTALRNLDENALVKILTEPKNALIKQYKGLFSIDNVELDFEDDALKLIAKTALESKTGARGLRAIMERILLPVMFTTPSDPSIEKITITADCVKNAGMPEIEKNPARLAPKNLPADTTA

SEQ ID NO: 2704 - protein, 427 aa, unidentified
  REGION 1..427: note = Description of Unknown: uncultivated organism sequence
  REGION 1..427: note = Category: MG90 effectors
  REGION 1..427: note = Description: MG90-27 effector
MEKSKLDVVCSFCGKKIPSDVMVAQGIDEDTFICQHCLIALEETFRAADTLIENEEEEHKKDDKKHKRLPRPSEIKAHLDQYIIGQEYAKKVLSVAVYNHYKMLGVKFGNKAVNKDVELEKSNVLLAGPSGSGKTAILKALAKFLKVPFVIADSTEYTSAGYVGKDVECIARDMISAANGDIKKAERGIVYIDEIDKTSRKGENLSTTSDPGHEGTQQALLKLLEGTMLDVPMDGRRLNPESRNVQKISTENMLFIVGGAFEGIEKIIAKRKRQGQNTMGIGAKLVDRKNDKYNDFIEDLATEDLKKFGMLPELLGRVPVIAPLKELTEDQLVQILHEPKNALVKQYQELFIQDGIQLEVTENAMKAIARKAIKRKTGARGLRGIMENILNPVMFSAPDKDIDYVLVDAEDDEIKIKGKKRKVKEAV

SEQ ID NO: 2705 - protein, 475 aa, unidentified
  REGION 1..475: note = Description of Unknown: uncultivated organism sequence
  REGION 1..475: note = Category: MG90 effectors
  REGION 1..475: note = Description: MG90-28 effector
MKDYEEELKDTKDGSGKNENKEDYEDICYICRRPESKVGKLIHLPMEGICICPDCMQRSFTAMSNTNINYEDLMRNMNLQDMFPGNIQDGIPKSQRLKKKKPKDKNEPAIDLKQILPPHQIKARLDDYVIGQDYAKKVMSVAVYNHYKRVATNTMDEIEIEKSNMLMIGPTGCGKTYLVRTLARLLDVPLAIADATSLTEAGYIGDDIESVVSKLLAAADNDVEKAERGIIFIDEIDKIAKKKNTTSRDVSGESVQQGLLKLLEGSDVEVPVGASSKNAMVPLTTVNTRNILFICGGAFPDLEGIIKARLNKTSGIGFGAALNDAHDQDPDIMSRVTIDDLREFGMIPEFIGRLPVIFTLKGLDEEALVKILKEPKNAIIKQYQKLLALDEVDLQFDDGALEAIAKRAIEKKTGARALRSIIEELMLDIMYQIPKDDNIGRVTITQPYVEHTGGPLIEMRGVFSLPNKTPAVGIE

SEQ ID NO: 2706 - protein, 427 aa, unidentified
  REGION 1..427: note = Description of Unknown: uncultivated organism sequence
  REGION 1..427: note = Category: MG90 effectors
  REGION 1..427: note = Description: MG90-29 effector
MEKEGKIYCDFCGKEIEPGEFGATGINGVFICQDCLKEFHESVMAQDTYLESEKKKQEREEVEKEDFQIPRPSMIKAHLDKYIEGQDYAKRVLSVAVYNHYKMLRAKHSGEYNNKDVELEKSNILLCGPTGSGKTAVLRALSKYLKVPFTMADITSYSSAGYVGKDVETIIRDLIVAADGDVKAAERGIVYIDEIDKTSRKGENLSTTSDPGHEGVQQALLKLLEGQMVEVPNKGRRLHPESNNTTMVNTANILFIVGGAFEGIEKIVSQRLHQHSSSMGFGAKLEDKKNDQYNDFIEKVTTEDFRKFGMLPELLGRVPVIAPMKQLSEEQLVHILYRPKNALVKQYQELLSQDNVDLKFTQKALKSIAHDAIKRKTGARGLRGIMEDILNPVMFEVPDKDVDAVVVDADDDDKIKIEYKDLKKEAV

SEQ ID NO: 2707 - protein, 416 aa, unidentified
  REGION 1..416: note = Description of Unknown: uncultivated organism sequence
  REGION 1..416: note = Category: MG90 effectors
  REGION 1..416: note = Description: MG90-30 effector
MSDELENLRCNFCGFKADLEEGIILIKGLDDVCICSECAEECVAIAEEENKIDSEKEMNLDVKPSEIKAYLDKYIIGQNYAKETLSVAVFNHYKMLKYKQQKKQAVELEKSNVLILGPTGTGKTYILRTLANFLNVPFAISDATSLTEAGYVGEDVENVVRRLIDAADGDIERAQTGIIYIDEVDKLTRKGENVSITRDVGGEGVQQAILKMVEGSLVEVPPQGGRKHPQQECAKIDTSNILFIIGGSFEGIDKIISKRQTKDSTIGFGGQIIDKKETSINEVIESVTVDDLKKFGMIPELLGRFPVIAPLKELDNNALQSILTEPKNALVKQYQELFKMDGIKLTFRKDALKAIAQLAQERKTGARALRGIMEDVLHKHMYSLPDDSTIKEVIITEDVVLKKSDPEIKRKKEQAS

SEQ ID NO: 2708 - protein, 419 aa, unidentified
  REGION 1..419: note = Description of Unknown: uncultivated organism sequence
  REGION 1..419: note = Category: MG90 effectors
  REGION 1..419: note = Description: MG90-31 effector
MISTIFINKGEFIMAKNNEFCCMCGSKKDEVDKLIRGKYGYICDSCISIASDLLNDEEEENITNNMQLATPSQIKAHLDQYVIGQDEAKRTLAVAVYNHYKRLKQNKKSDVEIQKSNILMIGSTGSGKTLIAQSLAKFLGVPFAIADATTLTEAGYVGDDVEVMLRTLLQNANYDIESAQRGIIYIDEIDKISRKGENVSITRDVSGEGVQQALLKIIEGTISEVPVTGSRKHPQAETIKIDTSNILFICGGAFDGIDKIIGKEETHNSIGFGANVADKKESVADLSKVEQHDLVKYGLMPELIGRLPIITALNPLSEEDLVHILTEPKNAITKQYQELLSMDGVKLEFEGEALRKISELAIKKKTGARGLRSIIESAMQKVMFDVPDMASVKKVVVTADCVEGKADALVYGARNKKIA

SEQ ID NO: 2709 - protein, 428 aa, unidentified
  REGION 1..428: note = Description of Unknown: uncultivated organism sequence
  REGION 1..428: note = Category: MG90 effectors
  REGION 1..428: note = Description: MG90-32 effector
MAKQEPQHIKCSLCQRDITVHDQYDLPIYDPRSGFAICKSCIREIYHFIEENDHQEAIVQQKDFAMTLDAKLAKIKPHIIKQYLDEYIINQERAKKILSVAVYNHYKRMKYSYLHEDETEIEKSNVIMLGPSGCGKTALLSHLATLLDIPFAVTDASSLTEAGFVGADVEVAVRNLYYAADKNTEKAEHGIIYLDEFDKIARKSGENNSITADPGHEGVQQALLKMLEGSVVEFTARGQRKHPEAPTIKVDTRNILFIVGGAFVGIEKIIAKRLKNTDTNIGFGAKVPSKEEKPKFDELIHKVRPEDLMKFGIIPEIIGRLPVICTLETLDEDALLRILTEPKNAPVKQYEKLLAMDNVQLEFSDTALRAVARKAIERKTGARSLKGIIEDVMLDIMFDIPKSDAKRKVTITEECLEKGENPKIEEIA

SEQ ID NO: 2710 - protein, 410 aa, unidentified
  REGION 1..410: note = Description of Unknown: uncultivated organism sequence
  REGION 1..410: note = Category: MG90 effectors
  REGION 1..410: note = Description: MG90-33 effector
MLETQIPPRRCSFCGKESAEVEALITGPKGVAICNFCVDECYEMIHSQVQEEKNIGEPANLPTPKEIKEFLDQYAIGQDEAKKVLSVAVYNHYKRIFSQTSSDDVDIEKSNILLIGPTGSGKTLLARSLAKLLDVPFAIADATTLTEAGYVGEDVENILLRLLQNADMDVEKAERGIIYIDEIDKIGRKSENSSITRDVSGEGVQQALLKILEGTVANVPPQGGRKHPQQQYIQIDTSNILFICGGAFVGLEDIIAKRIGKGTMGFNADLNKKKLERDELFQHVEPEDLVRFGLIPELIGRLPVIATLSELREEDLVKILNEPKNALVKQYKKLLDLEGVELEFTEEALREIAKEAIKRKTGARGLRAIMEKIMMDVMFEVPTKKNIKKVIIDNEAVLEGKPKYKLAKAS

SEQ ID NO: 2711 - protein, 474 aa, unidentified
  REGION 1..474: note = Description of Unknown: uncultivated organism sequence
  REGION 1..474: note = Category: MG90 effectors
  REGION 1..474: note = Description: MG90-34 effector
MKDYEEVKDTKDITEETEHKDDYEDVCYLCRRPESKVGKLIRLPMEGICICPDCMQRSFTMMGNTNINYEDLMKNMNLQDMFPGNIQDGIPKSQRLKKKKPKEKNEPVIDLKQILPPHQIKARLDDYVIGQDYAKKVMSVAVYNHYKRVATNTMDEIEIEKSNMLMIGPTGCGKTYLVRTLARLLDVPLAIADATSLTEAGYIGDDIESVVSKLLAAADNDVEKAERGIIFIDEIDKIAKKKNTTSRDVSGESVQQGLLKLLEGSDVEVPVGASSKNAMVPLTTVNTRNILFICGGAFPDLDGIIKARLNKTSGIGFGAMLSDAHDQDSDIVSQVTIDDLREFGMIPEFIGRLPVIFTLKGLDEAALVKILKEPKNAIIKQYQKLLALDEVDLQFDDGALEAIAKRAIEKKTGARALRSIIEELMLDIMYQIPKDDNIGRVTITQPYVEHRGGPLIEMRGIFSLPNKTPVAGIE

SEQ ID NO: 2712 - protein, 359 aa, unidentified
  REGION 1..359: note = Description of Unknown: uncultivated organism sequence
  REGION 1..359: note = Category: MG90 effectors
  REGION 1..359: note = Description: MG90-35 effector
MTPAEIKEGLDQYVIGQDEAKRVLSVSVYNHYKRILSGKGGDVELQKSNVLLLGPSGVGKTLLAQTLAKMLGVPFAIADATTLTEAGYVGEDVENILLKLIQAADFDVQKAQIGIIYIDEIDKITRKSENPSITRDVGGEGVQQALLKILEGTVSNVPPQGGRKHPQQEFIQIDTTNILFICGGAFDGLDKYILRRTDKSALGFGSALKDNSTEAERALLRKVEPHDLVKFGLIPELIGRLPVITVLDDLDEDALVRVLKEPRNSLVKQYKELLGMDNVELTFTDEALHAIARKTIERKTGARGLRSVMESILLPIMYEVPSDATIIRVTVDEDTVEGGEAHLEYGAVRKRYKNQAALS

SEQ ID NO: 2713 - protein, 428 aa, unidentified
  REGION 1..428: note = Description of Unknown: uncultivated organism sequence
  REGION 1..428: note = Category: MG90 effectors
  REGION 1..428: note = Description: MG90-36 effector
MAKQEPQHIKCSLCQRDITVHDQYDLPIYDPRSGFAICKSCIREIYHFIEENDHQEAIVQQKDFAMTLDAKLAKIKPHIIKQYLDEYIINQERAKKILSVAVYNHYKRMKYSYLHENETEIEKSNVIMLGPSGCGKTALLSHLATLLDIPFAVTDASSLTEAGFVGADVEVAVRNLYYAADKNTEKAEHGIIYLDEFDKIARKSGENNSITADPGHEGVQQALLKMLEGSVVEFTARGQRKHPEAPTIKVDTRNILFIVGGAFVGIEKIIAKRLKNTDTNIGFGAKVPSKEEKPKFDELIHKVRPEDLMKFGIIPEIIGRLPVICTLETLDEDALLRILTEPKNAPVKQYEKLLAMDNVQLEFSDTALRAVARKAIERKTGARSLKGIIEDVMLDIMFDIPKSDAKRKVTITEECLEKGENPKIEEIA

SEQ ID NO: 2714 - protein, 411 aa, unidentified
  REGION 1..411: note = Description of Unknown: uncultivated organism sequence
  REGION 1..411: note = Category: MG90 effectors
  REGION 1..411: note = Description: MG90-37 effector
MFETNIPERRCSFCGKAQSEVEALITGPKGVAICNQCVDECYKLLHEKEERKKGAPVKVEKLPTPKEIKEFLDQYVIGQEEAKKVLSVAVYNHYKRIMSGGNVDDVELEKSNILLIGPTGSGKTLLARSLAKLLDVPFAIADATTLTEAGYVGEDVENILLRLIQAADYDIEKAERGIIYIDEIDKIARKSENPSITRDVSGEGVQQALLKILEGTIANVPPQGGRKHPHQQYIQIDTSNILFICGGAFVGLEDIIARRIGKGAMGFTADVDKKKMERDELLKHVEPDDLVKFGLIPELIGRLPVIATLKELTEEDLVRVLTEPKNALVKQYKKMLELEGVELEFTEDALREIAREAIRRKTGARGLRAIMEKIMTDVMFEVPTRKDIKKVIIDAESVKTGKPKYELTKAS

SEQ ID NO: 2715 - protein, 472 aa, unidentified
  REGION 1..472: note = Description of Unknown: uncultivated organism sequence
  REGION 1..472: note = Category: MG90 effectors
  REGION 1..472: note = Description: MG90-38 effector
MSDYLDKNTEEKDKDKEYEDICYVCRRPESKAGKMIHLPINNICVCADCMQKSFDTMNKGGFNYSDMMNLNQLNNLNFQELLGMPVMNSGEDPIPQSQKLKKKKPKEEQAPALDIRDIPKPHVIKAQLDDYIIGQEYAKKVVSVAVYNHYKRVATNTMDDIEIEKSNMLMIGPTGCGKTYLVRTLAKLLDVPLAITDATTLTEAGYIGDDVESVVSKLLANADNDVEKAERGIIFIDEIDKIAKKKNTTSRDVSGESVQQGLLKLLEGSDIEVPVGASSKNAMVPMTTVNTRNILFICGGAFPDLENIIKERLTKQSSIGFIADLKDKYDNEENLISKVTIEDLRKFGMIPEFIGRLPVIFTLQGLTKDMLVKILKEPKNAILKQYQKLLALDEVDLQFEDGALEAIAEKALEKKTGARALRSIIEEFMLDIMYEIPKDDNIGRVTITRDYIENTGGPRIEMRGASALPMHS

SEQ ID NO: 2716 - protein, 406 aa, unidentified
  REGION 1..406: note = Description of Unknown: uncultivated organism sequence
  REGION 1..406: note = Category: MG90 effectors
  REGION 1..406: note = Description: MG90-39 effector
MAKNNEYCCMCGSRKDEVEKLIRGKYGYICDSCISIASDLINDEEEESITNNMQLATPSQIKAHLDQYVIGQDEAKRTLAVAVYNHYKRLKQNKKSDVEIQKSNILMIGSTGSGKTYLAQSLAKFLGVPFAITDATTLTEAGYVGDDVEVMLRTLLQNANYDIESAQRGIIYIDEIDKISRKGENMSITRDVSGEGVQQALLKIIEGTISEVPVTGSRKHPQADTIKIDTSNILFICGGAFDGIDKIIGKEETHNSIGFGANVTDKKESVADLSKVEQHDLVKYGLMPELIGRLPIITALNPLSEDDLVRILTDPKNAITKQYQELLSMDGIKLEFEDEALRKIAELAIKKKTGARGLRSIIESAMQKVMFDVPDMSSAKKVVVTAACVEGKADALVYGARNKKIA

SEQ ID NO: 2717 - protein, 418 aa, unidentified
  REGION 1..418: note = Description of Unknown: uncultivated organism sequence
  REGION 1..418: note = Category: MG90 effectors
  REGION 1..418: note = Description: MG90-40 effector
MEERDIIVSMTAAGNNNQTVRYNYRLYPTKTQEAVLNRLFGCCRVVYNDTIDFFNNNFNPNNQSKLPTAANASKQILTNAKKTTKRAFLKEVSSVALQQELRNAWLACLHGVSHSSNQKPAKRKTKKHNPVNSANFTSNGFSINQHGVYISKIGVIKTKWSRPMPSEPTSCTISHARNGRWYASFVVKRPKTPFAQCDNNAGIDMGLTDMATIVNTKGKRWKIENPRNYAKIQDKIGRLQRHLSKQTKGSKRYERTRHQIALLYSKAHDALADYQWKNVLNIIRETQAIGVETLDIKSMAVKHGKSVRDASMRSFLNKLGSKADEHCRVIIQLNQWLVTTKVCALCKHKLKVGLPEYARHWVCPKCGAHLDRDYNAALNILDAAGLAGSLNARGGSVRSFLVSAENGCSRGTAYHPNF

SEQ ID NO: 2718 - protein, 439 aa, unidentified
  REGION 1..439: note = Description of Unknown: uncultivated organism sequence
  REGION 1..439: note = Category: MG90 effectors
  REGION 1..439: note = Description: MG90-41 effector
MIDWGLQQHVTSKLTVPKPKDIKAKLDEYIVKQDHAKKVLAVAVHNHYKRIMSPAKDGIELGKSNILLIGPTGTGKTLLAQTLAKILDVPFAMADATSLTEAGYVGDDVENVVLNLVNAADGDIERACRGIIYIDEIDKIAKKGENPSITRDVSGEGVQQSLLKMIEGTVAAVPPKGGRKHPQQEFLRVDTTNILFICGGAFVGLADIIDKRTSLGSMGFNANVVNKDKRDLSALYHALEPEDLLKFGLIPELVGRLPVVATLEPLDEAALTEILTEPKNSLVKQYKKMFKIDGVDLEFDDDALAEIAKLAIKKESGARGLRSILENAMMPFLYAVPGMPNMKKLVITRDIIAKQGDLSQIDELNARYNAKQDDKSSNASTKTSDAESDDATSDDAKSGSDQSDDKSISSDDTIDDKSSNADDKKAKSARAKKTKKTDP

SEQ ID NO: 2719 - protein, 442 aa, unidentified
  REGION 1..442: note = Description of Unknown: uncultivated organism sequence
  REGION 1..442: note = Category: MG90 effectors
  REGION 1..442: note = Description: MG90-42 effector
MAENKDMTPDNSVEEKETIVCDFCGRRQKDPKDPVYGSRDGKSWICGECISTIHKVMNTKDTTVERIKAGAAASSPQKINIGTPAKIKAYLDQYIEGQEYAKRVLSVAVYNHYKMLKIKHRQEKSGEPPKVELEKANTIIIGPTGCGKTAIIRHLAKKLGVPFIITDATLYTSSGYVGSDVETIIRDLVKAAGGDVEAAQRGIVYIDEIDKTGRKGENLSTTSDPGHEGAQQALLKLLEGTMLEVPVGNNRKHPNAETFMVNTENILFIIGGSFEGIEKIIAKRLRDESGAGKIGFGSKLVDEKNKLFNEYIEKVTVDDLKKFGMLPELLGRVPVVAPMKELTEDQLMSILYRPKNALVKQYQELFAHDGVTLTVTEGAMRAIAQMAIRRKTGARGLRGIMETILNPVMFELPERSENAVLVDVVDGKINVAYEDKEEREAV

SEQ ID NO: 2720 - protein, 448 aa, unidentified
  REGION 1..448: note = Description of Unknown: uncultivated organism sequence
  REGION 1..448: note = Category: MG90 effectors
  REGION 1..448: note = Description: MG90-43 effector
MFDKKKTDDLRCSICGRHKNDTEVLVDTGQGILICDRCVKGLMKAMGIEAPAKSPADATAATGSEAAAAGEKKTAQEPAAPELEGKLPTPQELYAHLNNYVIGQEKAKRVLSVAVYNHYKRLRHANDDGVELSKSNVLLVGPTGSGKTLLAQTLARGLNVPFAIADATTLTEAGYVGEDVENIIHKLLQAADGNVERAQRGIVYLDEIDKIARKSENPSITRDVSGEGVQQALLKLVEGTLCNVPAAGGRKNPRGQMIAVDTSNILFICGGAFDGLEKIVRRRSVKSGIGFSAQVKSEKEASLSELLQDVEPSDLVKYGLIPELVGRLPVIAVLQELTEEGFVSILTEPKNALIKQFKELFAMEGVELEVTADALKAIAHKAMERKTGARGLRSIVEAALLDAMFEVPAKPEIGRVVLDKATIETGAPVDMIACPRKDPVKPEASQAS

SEQ ID NO: 2721 - protein, 413 aa, unidentified
  REGION 1..413: note = Description of Unknown: uncultivated organism sequence
  REGION 1..413: note = Category: MG90 effectors
  REGION 1..413: note = Description: MG90-44 effector
MNKVNDKMQKCSFCGAMASESDDNVLIQSENENSFICIDCIDTISLKMQKFKKKKAAIMSKKNLELSSLTPKRIKQFLDDYIIGQEEAKKIISVAVYNHYKSISIKERDPEIELEKSNIIMLGPSGCGKTAVVKALSKMLNVPFAIADASTLTAAGYVGSDVEVVLQRLLSSADNNVEEAQKGIVYIDEIDKISRKGENLSTTADPGHEEVQQALLKIIEGSIVDVPQKGNRKHPHGENIKMDTSNILFIVGGAFEGIEKIVAKRQKKGKTKIGFGSELKDDEKTYNELVNNVKVEDLKKFGMIPELLGRLPIICTMKELDENALIKILTEPKNALIKQYKRLLQEDGVELNVSDLALKAIANRAKERKTGARSLRSILEEILNPTMFDLPEKEVNQITLDINNNDFVVNYNK

SEQ ID NO: 2722 - protein, 407 aa, unidentified
  REGION 1..407: note = Description of Unknown: uncultivated organism sequence
  REGION 1..407: note = Category: MG90 effectors
  REGION 1..407: note = Description: MG90-45 effector
MANKNNEFCCMCGSKKDEVDKLIRGKYGYICDSCISIANDLLNDEEEESITNNMQLGTPSQIKAHLDQYVIGQDEAKRTLAVAVYNHYKRLKQNKKSDVEIQKSNILMIGSTGSGKTYLAQSLAKFLGVPFAIADATTLTEAGYVGDDVEVMLRTLLQNANYDIQAAQRGIIYIDEIDKISRKGENMSITRDVSGEGVQQALLKIIEGTVSEVPVTGSRKHPQAETIKIDTSNILFICGGAFDGIDKIIGKEETHNSIGFGANVADKKESITDLSKVEQHDLVKYGLMPELIGRLPIITALNPLSEDDLVHILTEPKNAITKQYQELLSMDGVKLEFEDEALRKIAELAIQKKTGARGLRSIIESAMQKVMFDVPDMSSAKKVVVTAACVEGKADALVYGARNKKIA

SEQ ID NO: 2723 - protein, 448 aa, unidentified
  REGION 1..448: note = Description of Unknown: uncultivated organism sequence
  REGION 1..448: note = Category: MG90 effectors
  REGION 1..448: note = Description: MG90-46 effector
MFDKKKTDDLRCSICGRHKNDTEVLVDTGQGILICDRCVKGLMKAMGIEAPAKSPADATAATGSEAAAAGEKKTAQEPAAPELEGKLPTPQELYAHLNNYVIGQEKAKRVLSVAVYNHYKRLRHANDDGVELSKSNVLLVGPTGSGKTLLAQTLARGLNVPFAIADATTLTEAGYVGEDVENIIHKLLQAADGNVERAQRGIVYLDEIDKIARKSENPSITRDVSGEGVQQALLKLVEGTLCNVPAAGGRKNPRGQMIAVDTSNILFICGGAFDGLEKIVRRRSVKFGIGFSAQVKSEKEASLSELLQDVEPSDLVKYGLIPELVGRLPVIAVLQELTEEGFVSILTEPRNALIKQFKELFAMEGVELEVTADALKAIAHKAMERKTGARGLRSIVEAALLDAMFEVPAKPEIGRVVLDKATIETGAPVDMIACPRKDPVKPEASQAS

SEQ ID NO: 2724 - protein, 361 aa, unidentified
  REGION 1..361: note = Description of Unknown: uncultivated organism sequence
  REGION 1..361: note = Category: MG90 effectors
  REGION 1..361: note = Description: MG90-47 effector
MHDSQGNRLRFEDLPKPAEIKAKLDEYIVGQDRAKVVLSVAVYNHYKRILYAGDNDVELQKSNILLIGPTGSGKTLFAQSLAKMLNVPFAIADATTLTEAGYVGEDVENILLRLLQAADFDVERAEKGIIYIDEIDKIARKSENTSITRDVSGEGVQQALLKLLEGTVANVPPQGGRKHPHQEFIKVDTTNILFICGGAFDGLDKIIEKRTEKKSMGFGADIKSSTERDVGELLKQAQQHDLLKFGIIPELIGRLPVIAPLTSLKREDLVRILTEPKNAMTKQYEALMAYDGVELVYEKDALEAVADKAIEMKIGARGLRSVMEGIMTDIMYTVPSEHDIEKVIVTADCVKNGTGPDVIRK

SEQ ID NO: 2725 - protein, 442 aa, unidentified
  REGION 1..442: note = Description of Unknown: uncultivated organism sequence
  REGION 1..442: note = Category: MG90 effectors
  REGION 1..442: note = Description: MG90-48 effector
MSDTKERCSFCGKEESDDRLLIGSEDGCAFICKHCFDRLKDEFADETLLKEESLNWKDLTPSKIKSYLDKYIIGQDRAKKVLSVAVYNHYKMLDYAKQQSDVELEKSNIIMVGPTGVGKTAIIKALAKILNVPFAITDATTLTENGYVGADPECCVQRLLYAADGDVDKTETGIIYIDEIDKIACKGENMSITRDVSGEGVQQALLKIIEGTIVDVPEKGVRKHPNAETIRVDTSKILFIVGGAFPGLEKIIKKRKKISNKAKIGFADGNAEKTAEEVTYNEVIDDVSPEDLKKFGIIAELLGRLPIITPLHELTEDQLCQILTEPKNALVRQYTEIFKYDDTDLVFEKDALKSIAARAIKNGTGARGLRAILESLLLDKMYEIPDLKQKNTLTITKQYVESKNAKEVSKHNGTGKQTVSTVLRRRQKPGESGTGCPDVAKS

SEQ ID NO: 2726 - protein, 373 aa, unidentified
  REGION 1..373: note = Description of Unknown: uncultivated organism sequence
  REGION 1..373: note = Category: MG90 effectors
  REGION 1..373: note = Description: MG90-49 effector
MVSNAPEPEEEIIDLPKPSEIKAYLDQYVIGQEEAKMIISVAVYNHYKRIFSQKKDDDIDLEKSNILMIGPTGCGKTLIAETLARFLKVPFAISDATTLTEAGYVGEDVENILVRLLQAADYDVAKAEKGIVYIDEIDKISRKSETPSITRDVSGEGVQQALLKILEGTKVNVPPKGGRKHPQQDFIEMDTKNILFIAGGAFFGLEKIIKERIDKKAIGFDVKLGTNIDEANIFDQTISQDLLKYGLIPELIGRMPVLCTLHELTEEALVEILVKPKNALCSQYKKYFELDGVELEFGEDALREIARIAINQKTGARGLRSIMEKFMLKIMYNIPDLDNIRSCHITADVVSKGEEPEFVFSSKSSNKRAAITR

SEQ ID NO: 2727 - protein, 394 aa, unidentified
  REGION 1..394: note = Description of Unknown: uncultivated organism sequence
  REGION 1..394: note = Category: MG90 effectors
  REGION 1..394: note = Description: MG90-50 effector
MKYCTVLEWCRSRKRDSEQAPKDLEDIRLMPPTEIKKVLDEYVIGQDMAKISLAVSVYNHYKRILSQEDDEDEVELQKSNVLLLGPTGVGKTFLAQTLAKILDVPFAIADATTITEAGYVGDDVENVLLRLLQAADFDVEAAERGIIYIDEIDKISRKSENVSLTRDVSGEGVQQALLKIVEGTVSNVPPQGGRKHPNQECIQVNTKNILFICGGAFDGLEKIIQKRQSPSGLGFGAPVAQSKKELSNIFRQAIPQDLVKFGLVPELVGRLPVITTLDDLDEDALIRILTEPKNALVKQYQKLFSYDEIELELEPNALRGIAKKAIERKTGARGLRSIMEGILMETMYQVPQMESVARVVITADCVEGTKKPTLLAKDGTEIPYPESESKAINA

SEQ ID NO: 2728 - protein, 359 aa, unidentified
  REGION 1..359: note = Description of Unknown: uncultivated organism sequence
  REGION 1..359: note = Category: MG90 effectors
  REGION 1..359: note = Description: MG90-51 effector
MTPAEIKDGLDQYVIGQDEAKRVLSVSVYNHYKRILSGKGGDVELQKSNVLLLGPSGVGKTLLAQTLAKMLGVPFAIADATTLTEAGYVGEDVENILLKLIQAADFDVQKAQIGIIYIDEIDKITRKSENPSITRDVGGEGVQQALLKILEGTVSNVPPQGGRKHPQQEFIQIDTTNILFICGGAFDGLDKYILRRTDKSALGFGSSLKDNSSEAERALLRKVEPHDLVKFGLIPELIGRLPVITVLDDLDEDALVRVLKEPRNSLVKQYKELLGMDNVELTFTDEALHAIARKTIERKTGARGLRSVMESILLPIMYEVPSDATIIRVTVDEDTVEGGEAHLEYGAVRKRYKNQVALS

SEQ ID NO: 2729 - protein, 448 aa, unidentified
  REGION 1..448: note = Description of Unknown: uncultivated organism sequence
  REGION 1..448: note = Category: MG90 effectors
  REGION 1..448: note = Description: MG90-52 effector
MFDKKKTDDLRCSICGRHKNDTEVLVDTGQGILICDRCVKGLMKAMGIEAPAKSPADATAATGSEAAAAGEKKTAQEPAAPELEGKLPTPQELYAHLNNYVIGQEKAKRVLSVAVYNHYKRLRHANDDGVELSKSNVLLVGPTGSGKTLLAQTLARGLNVPFAIADATTLTEAGYVGEDVENIIHKLLQAADGNVERAQRGIVYLDEIDKIARKSENPSITRDVSGEGVQQALLKLVEGTLCNVPAAGGRKNPRGQMIAVDTSNILFICGGAFDGLEKIVRRRSVKSGIGFSAQVKSEKEASLSELLQDVEPSDLVKYGLIPELVGRLPVIAVLQELTEEGFVSILTEPRNALIKQFKELFAMEGVELEVTADALKAIAHKAMERKTGARGLRSIVEAALLDAMFEVPAKPEIGRVVLDKATIETGAPVDMIACPRKDPVKPEASQAS

SEQ ID NO: 2730 - protein, 377 aa, unidentified
  REGION 1..377: note = Description of Unknown: uncultivated organism sequence
  REGION 1..377: note = Category: MG90 effectors
  REGION 1..377: note = Description: MG90-53 effector
MKSAQEPAAPELEGKLPTPQELYAHLNNYVIGQEKAKRVLSVAVYNHYKRLRHANDDGVELSKSNVLLVGPTGSGKTLLAQTLARGLNVPFAIADATTLTEAGYVGEDVENIIHKLLQAADGNVERAQRGIVYLDEIDKIARKSENPSITRDVSGEGVQQALLKLVEGTLCNVPAAGGRKNPRGQMIAVDTSNILFICGGAFDGLEKIVRRRSVKSGIGFSAQVKSEKEASLSELLQDVEPSDLVKYGLIPELVGRLPVIAVLQELTEEGFVSILTEPRNALIKQFKELFAMEGVELEVTAGALKAIAHKAMERKTGARGLRSIVEAALLDAMFEVPAKPEIGRVVLDKATIETGAPVDMIACPRKDPVKPEASQAS

SEQ ID NO: 2731 - protein, 407 aa, unidentified
  REGION 1..407: note = Description of Unknown: uncultivated organism sequence
  REGION 1..407: note = Category: MG90 effectors
  REGION 1..407: note = Description: MG90-54 effector
MANKNNEYCYMCGSKKDEVDKLIRGKYGYICDSCISIASELLNDEEEESITNNMQLATPSQIKAHLDQYVIGQDEAKRTLAVAVYNHYKRLKQNKKSDVEIQKSNILMIGSTGSGKTLIAQSLAKFLGVPFAIADATTLTEAGYVGSDVETMLRTLLQNADYDIQAAQRGIIYIDEIDKISRKSENVSITRDVSGEGVQQALLKIIEGTVSEVPVTGGRKHPQAETIKIDTSNILFICGGAFDGIDKIIGKEETHNSIGFGANVSDKKESVTDLSKVEQHDLVKYGLMPELIGRLPIITALNPLSEEDLVHILTEPKNAITKQYQELLSMDGVKLEFEDEALRKIAELAIKKKTGARGLRSIIEGSMQKIMFEIPDMSIAKKVVVTAACVEGKADALVYGARNKKIA

SEQ ID NO: 2732 - protein, 448 aa, unidentified
  REGION 1..448: note = Description of Unknown: uncultivated organism sequence
  REGION 1..448: note = Category: MG90 effectors
  REGION 1..448: note = Description: MG90-55 effector
MFDKKKTDDLRCSICGRHKNDTEVLVDTGQGILICDRCVKGLMKAMGIEAPAKSPADATAATGSEAAAAGEKKTAQEPAAPELEGKLPTPQELYAHLNNYVIGQEKAKRVLSVAVYNHYKRLRHANDDGVELSKSNVLLVGPTGSGKTLLAQTLARGLNVPFAIADATTLTEAGYVGEDVENIIHKLLQAADGNVERAQRGIVYLDEIDKIARKSENPSITRDVSGEGVQQALLKLVEGTLCNVPAAGGRKNPRGQMIAVDTSNILFICGGAFDGLEKIVRRRSVKSGIGFSAQVKSEKEESLSELLQDVEPSDLVKYGLIPELVGRLPVIAVLQELTEEGFVSILTEPRNALIKQFKELFAMEGVELEVTADALKAIAHKAMERKTGARGLRSIVEAALLDAMFEVPAKPEIGRVVLDKATIETGAPVDMIACPRKDPVKPEASQAS

SEQ ID NO: 2733 - protein, 448 aa, unidentified
  REGION 1..448: note = Description of Unknown: uncultivated organism sequence
  REGION 1..448: note = Category: MG90 effectors
  REGION 1..448: note = Description: MG90-56 effector
MFDKKKTDDLRCSICGRHKNDTEVLVDTGQGILICDRCVKGLMKAMGIEAPAKSPADATAATGSEAAAAGEKKTAQEPAAPELEGKLPTPQELYAHLNNYVIGQEKAKRVLSVAVYNHYKRLRHANDDGVELSKSNVLLVGPTGSGKTLLAQTLARGLNVPFAIADATTLTEAGYVGEDVENIIHKLLQAADGNVERAQRGIVYLDEIDKIARKSENPSITRDVSGEGVQQALLKLVEGTLCNVPAAGGRKNPRGQMIAVDTSNILFICGGAFDGLEKIVRRRSVKSGIGFSAQVKSEKEASLSELLQDVEPSDLVKYGLIPELVGRLPVIAVLQELTEEGFVSILTEPRNALIKQFKELFAMEGVELEVTAGALKAIAHKAMERKTGARGLRSIVEAALLDAMFEVPAKPEIGRVVLDKATIETGAPVDMIACPRKDPVKPEASQAS

SEQ ID NO: 2734 - protein, 411 aa, unidentified
  REGION 1..411: note = Description of Unknown: uncultivated organism sequence
  REGION 1..411: note = Category: MG90 effectors
  REGION 1..411: note = Description: MG90-57 effector
MFETKVPLRRCSFCGRDQTKVEALITGPGGVAICNYCIDECYEMIHQEREKKENSPVSIDRLPTPREIKEFLDQYVIGQDEAKKVLSVAVYNHYKRIMSGKDTDDVEIEKSNILLIGPTGSGKTLLARSLAKLLDVPFAIADATTLTEAGYVGEDVENILLRLIQAADYDIEKAERGIIYIDEIDKISRKSENPSITRDVSGEGVQQALLKILEGTIANVPPQGGRKHPHQQYIQIDTTNILFICGGAFVGLEDIIARRIGKGSMGFTADVDKKKLNRDELLKHVEPDDLVKFGLIPELIGRLPVIATLSELKEEDLVRVLKEPKNSLVKQYKKLLELEGVELEFTDDALRAIAKEAIRRKTGARGLRAIMEKIMTDVMFEVPTRKDVRKVIIDAESVKTGKPKYELVKAS

SEQ ID NO: 2735 - protein, 474 aa, unidentified
  REGION 1..474: note = Description of Unknown: uncultivated organism sequence
  REGION 1..474: note = Category: MG90 effectors
  REGION 1..474: note = Description: MG90-58 effector
MKDYEEVKDTKDITEETEHKDDYEDVCYLCRRPESKAGKLIRLPMEGICICPDCMQRSFTMMGNTNINYEDLMKNMNLQDMFPGNIQDGIPKSQRLKKKKPKEKNEPVIDLKQILPPHQIKARLDDYVIGQDYAKKVMSVAVYNHYKRVATNTMDEIEIEKSNMLMIGPTGCGKTYLVRTLARLLDVPLAIADATSLTEAGYIGDDIESVVSKLLAAADNDVEKAERGIIFIDEIDKIAKKKNTTSRDVSGESVQQGLLKLLEGSDVEVPVGASSKNAMVPLTTVNTRNILFICGGAFPDLDGIIKARLNKTSGIGFGAMLSDAHDQDSDIVSQVTIDDLREFGMIPEFIGRLPVIFTLKGLDEAALVKILKEPKNAIIKQYQKLLALDEVDLQFDDGALEAIAKRAIEKKTGARALRSIIEELMLDIMYQIPKDDNIGRVTITQPYVEHRGGPLIEMRGIFSLPNKTPVAGIE

SEQ ID NO: 2736 - protein, 448 aa, unidentified
  REGION 1..448: note = Description of Unknown: uncultivated organism sequence
  REGION 1..448: note = Category: MG90 effectors
  REGION 1..448: note = Description: MG90-59 effector
MFDKKKTDDLRCSICGRHKNDTEVLVDTGQGILICDRCVKGLMKAMGIEAPAKSPADATAATGSEAAAAGEKKTAQEPAAPELEGKLPTPQELYAHLNNYVIGQEKAKRVLSVAVYNHYKRLRHANDDGVELSKSNVLLVGPTGSGKTLLAQTLARGLNVPFAIADATTLTEAGYVGEDVENIIHKLLQAADGNVERAQRGIVYLDEIDKIARKSENPSITRDVSGEGVQQALLKLVEGTLCNVPAAGGRKNPRGQMIAVDTSNILFICGGAFDGLEKIVRRRSVKSGIGFSAQVKSEKEESLSELLQDVEPSDLVKYGLIPELVGRLPVIAVLQELTEEGFVSILTEPRNALIKQFKELFAMEGVELEVTSGALKAIAHKAMERKTGARGLRSIVEAALLDAMFEVPAKPEIGRVVLDKATIETGAPVDMIACPRKDPVKPEASQAS

SEQ ID NO: 2737 - protein, 448 aa, unidentified
  REGION 1..448: note = Description of Unknown: uncultivated organism sequence
  REGION 1..448: note = Category: MG90 effectors
  REGION 1..448: note = Description: MG90-60 effector
MFDKKKTDDLRCSICGRHKNDTEVLVDTGQGILICDRCVKGLMKAMGIEAPAKSPADATAATGSEAAAAGEKKTAQEPAAPELEGKLPTPQELYAHLNNYVIGQEKAKRVLSVAVYNHYKRLRHANDDGVELSKSNVLLVGPTGSGKTLLAQTLARGLNVPFAIADATTLTEAGYVGEDVENIIHKLLQAADGNVERAQRGIVYLDEIDKIARKSENPSITRDVSGEGVQQALLKLVEGTLCNVPAAGGRKNPRGQMIAVDTSNILFICGGAFDGLEKIVRRRSVKSGIGFSAQVKSEKEESLSELLQDVEPSDLVKYGLIPELVGRLPVIAVLQELTEEGFVSILTEPRNALIKQFKELFAMEGVELEVTAGALKAIAHKAMERKTGARGLRSIVEAALLDAMFEVPAKPEIGRVVLDKATIETGAPVDMIACPRKDPVKPEASQAS

SEQ ID NO: 2738 - protein, 448 aa, unidentified
  REGION 1..448: note = Description of Unknown: uncultivated organism sequence
  REGION 1..448: note = Category: MG90 effectors
  REGION 1..448: note = Description: MG90-61 effector
MFDKKKTDDLRCSICGRHKNDTEVLVDTGQGILICDRCVKGLMKAMGIEAPAKSPADATAATGSEAAAAGEKKTAQEPAAPELEGKLPTPQELYAHLNNYVIGQEKAKRVLSVAVYNHYKRLRHANDDGVELSKSNVLLVGPTGSGKTLLAQTLARGLNVPFAIADATTLTEAGYVGEDVENIIHKLLQAADGNVERAQRGIVYLDEIDKIARKSENPSITRDVSGEGVQQALLKLVEGTLCNVPAAGGRKNPRGQMIAVDTSNILFICGGAFDGLEKIVRRRSVKSGIGFSAQVKSEKEASLSELLQDVEPSDLVKYGLIPELVGRLPVIAVLQELTEEGFVSILTEPRNALIKQFKELFAMEGVELEVTAGALKAIAHKAMERKTGARGLRSIVEAALLDAMFEVPAKPEIGRVVLDKATIETGAPVDMIVCPRKDPVKPEASQAS

SEQ ID NO: 2739 - protein, 448 aa, unidentified
  REGION 1..448: note = Description of Unknown: uncultivated organism sequence
  REGION 1..448: note = Category: MG90 effectors
  REGION 1..448: note = Description: MG90-62 effector
MFDKKKTDDLRCSICGRHKNDTEVLVDTGQGILICDRCVKGLMKAMGIEAPAKSPADATAATGSEAAAAGEKKTAQEPAAPELEGKLPTPQELYAHLNNYVIGQEKAKRVLSVAVYNHYKRLRHANDDGVELSKSNVLLVGPTGSGKTLLAQTLARGLNVPFAIADATTLTEAGYVGEDVENIIHKLLQAADGNVERAQRGIVYLDEIDKIARKSENPSITRDVSGEGVQQALLKLVEGTLCNVPAAGGRKNPRGQMIAVDTSNILFICGGAFDGLEKIVRRRSVKSGIGFSAQVKSEKEASLSELLQDVEPSDLVKYGLIPELVGRLPVIAVLQELTEEGFVSILTEPRNALIKQFKELFAMEGVELEVTADALKAIAHKAMERKTGARGLRSIVEAALLDAMFEVPAKPEIGRVVLDKATIETGAPVDMIACPRKDPVKPEASQAF

SEQ ID NO: 2740 - protein, 448 aa, unidentified
  REGION 1..448: note = Description of Unknown: uncultivated organism sequence
  REGION 1..448: note = Category: MG90 effectors
  REGION 1..448: note = Description: MG90-63 effector
MFDKKKTDDLRCSICGRHKNDTEVLVDTGQGILICDRCVKGLMKAMGIEAPAKSPADATVATGSEAAAAGEKKTAQEPAAPELEGKLPTPQELYAHLNNYVIGQEKAKRVLSVAVYNHYKRLRHANDDGVELSKSNVLLVGPTGSGKTLLAQTLARGLNVPFAIADATTLTEAGYVGEDVENIIHKLLQAADGNVERAQRGIVYLDEIDKIARKSENPSITRDVSGEGVQQALLKLVEGTLCNVPAAGGRKNPRGQMIAVDTSNILFICGGAFDGLEKIVRRRSVKSGIGFSAQVKSEKEASLSELLQDVEPSDLVKYGLIPELVGRLPVIAVLQELTEEGFVSILTEPRNALIKQFKELFAMEGVELEVTADALKAIAHKAMERKTGARGLRSIVEAALLDAMFEVPAKPEIGRVVLDKATIETGAPVDMIACPRKDPVKPEASQAS

SEQ ID NO: 2741 - protein, 448 aa, unidentified
  REGION 1..448: note = Description of Unknown: uncultivated organism sequence
  REGION 1..448: note = Category: MG90 effectors
  REGION 1..448: note = Description: MG90-64 effector
MFDKKKTDDLRCSICGRHKNDTEVLVDTGQGILICDRCVKGLMKAMGIEAPAKSPADATAATGSEAAAAGEKKTAQEPAAPELEGKLPTPQELYAHLNNYVIGQEKAKRVLSVAVYNHYKRLRHANDDGVELSKSNVLLVGPTGSGKTLLAQTLARGLNVPFAIADATTLTEAGYVGEDVENIIHKLLQAADGNVERAQRGIVYLDEIDKIARKSENPSITRDVSGEGVQQALLKLVEGTLCNVPAAGGRKNPRGQMIAVDTSNILFICGGAFDGLEKIVRRRSVKSGIGFSAQVKSEKEESLSELLQDVEPSDLVKYGLIPELVGRLPVIAVLQELTEEGFVSILTEPRNALIKQFKELFAMEGVELEVTAGALKAIAHKAMERKTGARGLRSIVEAALLDAMFEVPAKPEIGRVVLDKATIETGAPVDMIVCPRKDPVKPEASQAS

SEQ ID NO: 2742 - protein, 448 aa, unidentified
  REGION 1..448: note = Description of Unknown: uncultivated organism sequence
  REGION 1..448: note = Category: MG90 effectors
  REGION 1..448: note = Description: MG90-65 effector
MFDKKKTDDLRCSICGRHKNDTEVLVDTGQGILICDRCVKGLMKAMGIEAPAKSPAAASAATGSEAVAAGEMKSAQEPAAPELEGKLPTPQELYAHLNNYVIGQEKAKRVLSVAVYNHYKRLRHANDDGVELSKSNVLLVGPTGSGKTLLAQTLARGLNVPFAIADATTLTEAGYVGEDVENIIHKLLQAADGNVERAQRGIVYLDEIDKIARKSENPSITRDVSGEGVQQALLKLVEGTLCNVPAAGGRKNPRGQMIAVDTSNILFICGGAFDGLEKIVRRRSVKSGIGFSAQVKSEKEESLSELLQDVEPSDLVKYGLIPELVGRLPVIAVLQELTEEGFVSILTEPRNALIKQFKELFAMEGVELEVTAGALKAIAHKAMERKTGARGLRSIVEAALLDAMFEVPAKPEIGRVVLDKATIETGAPVDMIACPRKDPVKPEASQAF

SEQ ID NO: 2743 - protein, 428 aa, unidentified
  REGION 1..428: note = Description of Unknown: uncultivated organism sequence
  REGION 1..428: note = Category: MG90 effectors
  REGION 1..428: note = Description: MG90-66 effector
MAKQEPQHIKCSLCQRDITVHDQYDLPIYDPRSGFAICKSCIREIYHFIEENDHQEAIVQQKDFAMTLDAKLAKIKPHIIKQYLDEYIINQERAKKILSVAVYNHYKRMKYCYLHEDETEIEKSNVIMLGPSGCGKTALLSHLATLLDIPFAVTDASSLTEAGFVGADVEVAVRNLYYAADKNTEKAEHGIIYLDEFDKIARKSGENNSITADPGHEGVQQALLKMLEGSVVEFTARGQRKHPEAPTIKVDTRNILFIVGGAFVGIEKIIAKRLKNTDTNIGFGAKVPSKEEKPKFDELIHKVRPEDLMKFGIIPEIIGRLPVICTLETLDEDALLRILTEPKNAPVKQYEKLLAMDNVQLEFSDTALRAVARKAIERKTGARSLKGIIEDVMLDIMFDIPKSDAKRKVTITEECLEKGENPKIEEIA

SEQ ID NO: 2744 - protein, 372 aa, unidentified
  REGION 1..372: note = Description of Unknown: uncultivated organism sequence
  REGION 1..372: note = Category: MG90 effectors
  REGION 1..372: note = Description: MG90-67 effector
MVSNAPEPEEEIIDLPKPSEIKAYLDQYVIGQEEAKMIISVAVYNHYKRIFSRKDDDIDLEKSNILMIGPTGCGKTLIAETLARFLKVPFAISDATTLTEAGYVGEDVENILVRLLQAADYDVAKAEKGIVYIDEIDKISRKSETPSITRDVSGEGVQQALLKILEGTKVNVPPKGGRKHPQQDFIEMDTKNILFIAGGAFFGLEKIIKERIDKKAIGFDVKLGTNIDEANIFDQTISQDLLKYGLIPELIGRMPVLCTLHELTEEALVEILVKPKNALCSQYKKYFELDGVELEFGEDALREIARIAINQKTGARGLRSIMEKFMLKIMYNIPDLDNIRSCHITADVVSKGAEPEFVFSSKSSNKRAAITR

SEQ ID NO: 2745 - protein, 475 aa, unidentified
  REGION 1..475: note = Description of Unknown: uncultivated organism sequence
  REGION 1..475: note = Category: MG90 effectors
  REGION 1..475: note = Description: MG90-68 effector
MKDYEEEVKDTKDDAGENERKDDYEDICYMCRRPESKAGKLIHLPMEGICICPDCMQRSFTAMTNTNINYEDLMRNMNFQDMFPGNIQDGIPKSQRLKKKKPKENKEPAIDLKAILPPHQIKARLDDYVIGQDYAKKVMSVAVYNHYKRVATNTMDEIEIEKSNMLMIGPTGCGKTYLVRTLARLLDVPLAIADATSLTEAGYIGDDIESVVSKLLAAAGNDVEKAERGIIFIDEIDKIAKKKNTTSRDVSGESVQQGLLKLLEGSDVEVPVGASSKNAMVPLTTVNTRNILFICGGAFPDLEGIIKARLNKTSGIGFEAALNDAHDQDPEIMSQVTIDDLREFGMIPEFIGRLPVIFTLKGLDEKALVKILKEPKNAIIKQYQKLLALDEVDLQFDDEALEAIAKRAIQKKTGARALRSIIEELMLDIMYQIPKDDNIGRVTITEPYVEHTGGPLIEMRGVLTLPNKTPVAGIE

SEQ ID NO: 2746 - protein, 360 aa, unidentified
  REGION 1..360: note = Description of Unknown: uncultivated organism sequence
  REGION 1..360: note = Category: MG90 effectors
  REGION 1..360: note = Description: MG90-69 effector
MDSYVIGQDEAKKVLSVAVYNHYKRVLAGNDLDVELQKSNILMLGPTGSGKTYLAQTLAKILNVPFAIADATTLTEAGYVGEDVENILLKLIQAADYDIEKAQYGIVYIDEIDKITKKSENVSITRDVSGEGVQQALLKILEGTVASVPPQGGRKHPHQELLQIDTTNVLFICGGAFDGLEKIIENRMDQKAIGFNSEITDNTEMNNDALFGEVMPQDLVKFGIIPEFIGRVPVTVALKSLDENALVEILTKPKNAIVKQYEKLFELDGVKLTFTDEALKTIAKKSFERKTGARGLRAIMEQTVLDVMYETPSDETIEECIINEDVVNQLADPELKYKNNLDAKIKRANKKAKNEQIQPA

SEQ ID NO: 2747 - protein, 404 aa, unidentified
  REGION 1..404: note = Description of Unknown: uncultivated organism sequence
  REGION 1..404: note = Category: MG90 effectors
  REGION 1..404: note = Description: MG90-70 effector
MFSGIDGYICDDCVDRCSELLDDENYGWDKEEQFSDINLLKPKEIREFLDQYVIGQDAAKKVLSVAVYNHYKRITSGQKSEVEIQKSNILMLGPTGSGKTYLAQTLARLLNVPFAIADATTLTEAGYVGEDVENILLKLIQAADNNVARAEYGIIYIDEIDKISKKSENVSITRDVSGEGVQQALLKILEGTNASVPPQGGRKHPQQELIPINTTNILFICGGAFDGLEKIIERRLGSGGIGFNSEVVEKHSRGIDELFRQVMPQDLMKFGLIPELIGRVPVTVSLDLLDEDALVRILTEPKNALTKQYKSLFEMDGVKLEFTEDAIREVAHQAVERKTGARGLRAIMEDVMMDIMYEIPSDPSIGICTVTREAVLKQKQPEIVYRDLAAAGRPAGRVSGGVTA

SEQ ID NO: 2748 - protein, 448 aa, unidentified
  REGION 1..448: note = Description of Unknown: uncultivated organism sequence
  REGION 1..448: note = Category: MG90 effectors
  REGION 1..448: note = Description: MG90-71 effector
MFDKKKTDDLRCSICGRHKNDTEVLVDTGQGILICDRCVKGLMKAMGIEAPAKSPADATAATGSEAAAAGEKKTAQEPAAPELEGKLPTPQELYAHLNNYVIGQEKAKRVLSVAVYNHYKRLRHANDDGVELSKSNVLLVGPTGSGKTLLAQTLARGLNVPFAIADATTLTEAGYVGEDVENIIHKLLQAADGNVERAQRGIVYLDEIDKIARKSENPSITRDVSGEGVQQALLKLVEGTLCNVPAAGGRKNPRGQMIAVDTSNILFICGGAFDGLEKIVRRRSVKSGIGFSAQVKSEKEASLSELLQDVEPSDLVKYGLIPELVGRLPVIAVLQELTEEGFVSILTEPRNALIKQFKELFAMEGVELEVTADALKAIAHKAMERKTGARGLRSIVEAALLDAMFEVPAKPEIGRVVLDKATIETGAPVDMIVCPRKDPVKPEASQAS

SEQ ID NO: 2749 - protein, 379 aa, unidentified
  REGION 1..379: note = Description of Unknown: uncultivated organism sequence
  REGION 1..379: note = Category: MG90 effectors
  REGION 1..379: note = Description: MG90-72 effector
MDIIREEHKTTLVKSRDGVPTPRDICTVLDDYVIGQPHAKRVLSVAVHNHYKRLAHGQKNNDVEISKSNILLVGPTGCGKTLLAQTLARIIDVPFTMADATTLTEAGYVGEDVENIILRLLQAADYNVERAQRGIVYIDEVDKISRKSENPSITRDVSGEGVQQALLKIMEGTIASVPPQGGRKHPQQEFLQVDTTNILFICGGAFAGLEKIISQRSRGTSIGFGADVRGVDERQTGEILRGVEPEDLLKFGLIPEFIGRLPVIATLSDLDENTLVEILIRPKNALLKQYQRLFEMEGVHLEFADDALRSVARRAIAHKTGARGLRSIMEGILLDSMFELPTMSGVDEIVINREVVEGRASPLQIYADRRGDNVGGSSA

SEQ ID NO: 2750 - protein, 363 aa, unidentified
  REGION 1..363: note = Description of Unknown: uncultivated organism sequence
  REGION 1..363: note = Category: MG90 effectors
  REGION 1..363: note = Description: MG90-73 effector
MVSPTPVKAGAKAAKPAADSRKKLTPKAIHAYLDQYVIGQDRAKKVLSVAVYNHYKRLENNLDAIDSQVELEKSNILLAGPTGTGKTLLARTIARLLDVPFTIVDATVLTEAGYVGEDVESILSRLLEQADYDVARTERGIVFIDEIDKVARKSDNPSITRDVSGEGVQQAMLKLLEGNVVNVPPKGGRKHPEQDFVHINTQNILFICGGAFEGIERRIAQRLNTQVIGFDSAAKQQVDKENLLQYVSQEDFRAYGLIPEIIGRLPVITYLDPLDEDALKRILVEPKNALIKQYEKMFEMDGKKLVVEPEVLDFIVKTAVEKKIGARGLRSICEKIFTEAMYEAPSSQQAVYTVTLDFARKAI

SEQ ID NO: 2751 - protein, 442 aa, unidentified
  REGION 1..442: note = Description of Unknown: uncultivated organism sequence
  REGION 1..442: note = Category: MG90 effectors
  REGION 1..442: note = Description: MG90-74 effector
MMFQDPTTGTALCFSCAQKMMAMAAAKQRYENNGVSELEREQAAAAKLQLHREEAKQLFEIMSNESPAKIKAHLDKYIIGQDGAKKVLSVAVYNHYKRLAFFEAQKCKELETGKKIEGLAQLDKSNILMLGPTGVGKTAILKAIALYLGVPFTVVDSSTLTQSGYVGSDPETCVRQLWEEAGKDREKTERGIIFLDEFDKIARKSGTNRSTSADPGHEGVQQALLKIVEGTKVHFTLGNRKHPDAQTIEVDTTNILFVCGGAFEGIEKIIAKRVETGNGFGYTHVDKLGLDELKDEADRFNRLIEEATPDDVKEYGIIPEMLGRLPIMCKLHQLKENDLIRILTEPKNAIIKQFAVLFDMDGCRLKPDREALKEIARKAIKTGTGARSLRTIIEGILLDTMYDLPQISEQAAEGTKPVIHLTGEAVKTKKLSVEYVKAPMAA

SEQ ID NO: 2752 - protein, 411 aa, unidentified
  REGION 1..411: note = Description of Unknown: uncultivated organism sequence
  REGION 1..411: note = Category: MG90 effectors
  REGION 1..411: note = Description: MG90-75 effector
MFETNIPERRCSFCGRGQNEVEALITGPKGVAICNVCVDECYKMLHEKEEKRKGAPVKVDRLPTPKEIKEFLDQYVIGQEEAKKVLSVAVYNHYKRIMSGGTVDDVELEKSNILLIGPTGSGKTLLARSLAKLLDVPFAIADATTLTEAGYVGEDVENILLRLIQAADYDIEKAERGIIYIDEIDKIARKSENPSITRDVSGEGVQQALLKILEGTIANVPPQGGRKHPHQQYIQIDTSNILFICGGAFVGLEDIIARRIGKGAMGFTADVDKKKMERDELLKHVEPDDLVKFGLIPELIGRLPVIATLKELSEEDLVRVLTEPKNALVKQYKKMLELEGVELEFTEDALREIAREAIRRKTGARGLRAIMEKLMTDVMFEVPTRKDVKKVIIDAEAVKTGKPKYELTKAS

SEQ ID NO: 2753 - protein, 532 aa, unidentified
  REGION 1..532: note = Description of Unknown: uncultivated organism sequence
  REGION 1..532: note = Category: MG90 effectors
  REGION 1..532: note = Description: MG90-76 effector
MENYHKETHCSFCGKSESEVETIINGPNGMTICNECIETCEYILNKGKSADNSGLSLYTPKEIKAKLDEYIIGQDSAKRVLSVAVYNHYKRISQLGEKKKNDGVVIEKSNVLLLGPTGSGKTLLAKTLAQILNVPFAVADATTLTEAGYVGEDVENILLKLIQSANGDLKRAEIGIVYIDEYIIGQDSAKRVLSVAVYNHYKRISQLGEKKKNDGVVIEKSNVLLLGPTGSGKTLLAKTLAQILNVPFAVADATTLTEAGYVGEDVENILLKLIQSANGDLKRAEIGIVYIDEIDKIAKKGENVSITRDVSGEGVQQALLKIIEGTVANVPPQGGRKHPNQECYQLDTTNILFLCGGAFVDLDKIIDQRKDNSKLGFGSAVKGTVDYRYDELIEALQPADLIKYGLIPEFVGRVPIVVGLNALDENALVKILSEPKNALVKQYKYQFELDGVDLEFEDDALRAVAAKAIQLNTGARGLRAILEDVLLELMFEIPSDGDIEKVIVTKGAIEKTEKPIVVRAQGVKGETANNIA

SEQ ID NO: 2754 - protein, 412 aa, unidentified
  REGION 1..412: note = Description of Unknown: uncultivated organism sequence
  REGION 1..412: note = Category: MG90 effectors
  REGION 1..412: note = Description: MG90-77 effector
MFETKIPERRCSFCGRGQSEVEALITGPKGVAICNLCVDECYKMLHEESERKKKGAPVGVEKLPTPKEIKEFLDQYVIGQEEAKKVLSVAVYNHYKRIMSGGNVDDVELEKSNILLIGPTGSGKTLLARSLAKFLDVPFAIADATTLTEAGYVGEDVENILLRLIQAADYDIEKAERGIIYIDEIDKIARKSENPSITRDVSGEGVQQALLKILEGTIANVPPQGGRKHPHQQYIQIDTSNILFICGGAFVGLEDIIARRIGKGAMGFTADVDKKKMERDELLKHVEPDDLVKFGLIPELIGRLPVIATLKELKEEDLVRVLTEPKNALVKQYQKMLELEGVELEFTEDALREIAKEAIRRKTGARGLRAIMEKLMTDVMFEVPTRKDIKKVIIDAESVKTGKPKYELTKAS

SEQ ID NO: 2755 - protein, 350 aa, unidentified
  REGION 1..350: note = Description of Unknown: uncultivated organism sequence
  REGION 1..350: note = Category: MG90 effectors
  REGION 1..350: note = Description: MG90-78 effector
MKIPTPKELKAFLDEHVIGHDEVKKVLAVAVHNHYRRLEAAFSREANPEFADVEIEKSNILLIGPTGTGKTLLAKTLAKLLGVPFAIGDATVLTQAGYVGEDVENLVRYLYVNAGEDVQLAQTGIIYVDEIDKIASKTDNVSITRDVSGEGVQQALLKIIEGSTCRLPPKGGRKHPDQEYVEVDTRNILFICGGAFVGLDKIVAARTGKHTIGFGGEDSAQADSELIAKDVRPEDLVKFGLIPEFTGRLPIIATMGELTEDQLVDVLTKPKNALVKQYQKLLAMDGVKLEFEEDALRELAKMALKRKTGARGLRAEMERLMTDVMYEAPGNPKLKKVTVTAKLIKEKLCK

SEQ ID NO: 2756 - protein, 411 aa, unidentified
  REGION 1..411: note = Description of Unknown: uncultivated organism sequence
  REGION 1..411: note = Category: MG90 effectors
  REGION 1..411: note = Description: MG90-79 effector
MFETNIPERRCSFCGKAQSEVEALITGPKGVAICNQCVDECYKLLHEKEERKKGAPVKVEKLPTPKEIKEFLDQYVIGQEEAKKVLSVAVYNHYKRIMSGGNVDDVELEKSNILLIGPTGSGKTLLARSLAKLLDVPFAIADATTLTEAGYVGEDVENILLRLIQAADYDIEKAERGITYIDEIDKIARKSENPSITRDVSGEGVQQALLKILEGTIANVPPQGGRKHPHQQYIQIDTSNILFICGGAFVGLEDIIARRIGKGAMGFTADVDKKKMERDELLKHVEPDDLVKFGLIPELIGRLPVIATLKELTEEDLVRVLTEPKNALVKQYKKMLELEGVELEFTEDALREIAREAIRRKTGARGLRAIMEKIMTDVMFEVPTRKDIKKVIIDAESVKTGKPKYELTKAS

SEQ ID NO: 2757 - protein, 402 aa, unidentified
  REGION 1..402: note = Description of Unknown: uncultivated organism sequence
  REGION 1..402: note = Category: MG90 effectors
  REGION 1..402: note = Description: MG90-80 effector
MQTVRYNYRLYPTKTQETVLNRLFGCCRVVYNDTIDFFNNNFNPNNQSKLPTVSKASKQILTNAKKTTKRAFLKEVSSVALQQELRNAWLACLHGVSHSSNQKPAKRKTKKHNPVNSANFTGNSFIVKQHGVYIQKIGVIKTKWSRPMPSEPTSCTISHARNGRWYASFVVKRPKTPFAQCDNNAGIDMGLTDMATIVNTKGKRWKIANPRNYAKLQDKISRLQRHLSKQTKGSKRYERTRHQIALLYSKAHDALADYQWKNVLNIIRETQAIGVETLNIQGMTAKHGKSVRDAAMRSFLNKLGSKAEEHCRIIIQLNQWLATTKVCALCKHKLKAGIPEYARHWVCPNCGAHLDRDYNAALNILDAAGLAGSLNARGGGVRSFLASAENGCSRRTAYHPSF

SEQ ID NO: 2758 - protein, 394 aa, unidentified
  REGION 1..394: note = Description of Unknown: uncultivated organism sequence
  REGION 1..394: note = Category: MG90 effectors
  REGION 1..394: note = Description: MG90-81 effector
MEEGSADKGHVTIVYPAYPNVGQERELLRTLGVVRGLYNHFLAESIADVMEGDRFPTPREMNKAITVMRGRDIGLGSVAVFTLRDAPLRVHAAMTSFAKLSARSGELRLPRFKSESRYRSLAFDPKGVKFDGRRIVFGKWVKLRCGNLDRNRKLHRPEGGRIVTARIVRKGSGRWYVHITFEVDRRYRSEIDLSDPAEPEAYDLGLCDIITDSKGERIGAPDLYARHENEIARLQRQIASMEDGPKRRKKQRRLSVLHERIRRRRDGYLDEVADRMVSGHSAVILEDLRLRRMIERDDSPAPRRKLFTEAALGTLVRKVEAKAERACIPLVKVDPAYTTRRCSCCGHVGEKMPLSLRVFSCPRCGLEMDRDHNAALNILGSGMGTLRGSAEPSG

SEQ ID NO: 2759 - protein, 423 aa, unidentified
  REGION 1..423: note = Description of Unknown: uncultivated organism sequence
  REGION 1..423: note = Category: MG90 effectors
  REGION 1..423: note = Description: MG90-82 effector
MAEEIKESVCSFCGKHYTDNDKTILFTADTPGALICYDCAKEIYSNYKDKIDSMREVSGSVQADQKWTPQSMKEYLDQYIIGQEKAKEILCTAVYNHYQILKMREDGNKDAVEVEKSNVIMAGPTGVGKTAIIKRLAKIMQVPCVIADSTSLTSAGYVGDDVESVIQSLLIEADYDVEKAQKGIVYLDEIDKTNRHGENPSTTADPGHEGTQQALLKLIEGTVANVPLKGQRKHPNADMVKVDTSNILFIVGGAFEGIEKIITRRHNSGMAGVGFGSVLVNDKDKKKSYNEIIGDLRVEDLKKFGMTPELLGRLPVICPMKELTEEQLVEILSKPKNSLLKQYQTLFKAQGVDLTFDDEALKTVAHLAIERKTGARGLRGIMENILSHEMYSIPSDDSIGSVTVTGKDFEIIRGEKPAEKVSA

SEQ ID NO: 2760 - protein, 432 aa, unidentified
  REGION 1..432: note = Description of Unknown: uncultivated organism sequence
  REGION 1..432: note = Category: MG90 effectors
  REGION 1..432: note = Description: MG90-83 effector
MAILDCVCSFCGNVIPDDISCVQGIGNTYICEPCARKVISSLNMTNTFLENEEKTKNMDAPEAFRLPHPAQIKAHLDKYIIGQEKAKEVLSVAVYNHYKMLAIKARRNAETNNTKKNMVELEKSNCLLIGPTGSGKTALIRVLAKILKVPLTIADATSYTSSGYVGKDCETILRDLLTAANGELERAERGIVYINEIDKTSRKGENMSITSDPGHEGLQQALLKLLEGSTVEVPISGRRLNPENGNSVMINTENILFIVGGAFEGIEKIIARRIRKESSAGTMGFGSQLIDKKNQKFNEFIERVTTEDLRKFGMLPEILGRLPVIAPLKELAEDELVNILYRPRNALVKQYQELLRHDGIDLEVTPLALHAIAREAIKKKTGARGLRGIMEDTLMDVMFKAPDRDENSIVIDADNHGKIIVNFIQKKVKEAV

SEQ ID NO: 2761 - protein, 354 aa, unidentified
  REGION 1..354: note = Description of Unknown: uncultivated organism sequence
  REGION 1..354: note = Category: MG90 effectors
  REGION 1..354: note = Description: MG90-84 effector
MDELLKPAEIKSFLDQYVIGQDAAKRYLSVAVYNHYKRLLYAPKEDEVELDKSNIVLVGPTGTGKTLMARTIARLLKVPFTIVDATVLTEAGYVGEDVESILSRLLQVADYDVEQAERGIVFIDEIDKIARKGDNPSITRDVSGEGVQQALLKILEGTVVNVPPQGGRKHPEQKFIQVNTRNILFICGGAFDGIEKRIAQRLNTRAMGYGRVNADPIDRGNLMQYVTPQDLKSFGLIPELVGRLPVLTYMQPLDRAALRSILTEPKNAIVKQYERLFEMDGVKLTFDDAVLDYIVDKAVEFKLGARGLRSICEAVMMDTMFELPSTDRKKFTVTLSYAKKKIEKANFLDLKKVG

SEQ ID NO: 2762 - protein, 382 aa, unidentified
  REGION 1..382: note = Description of Unknown: uncultivated organism sequence
  REGION 1..382: note = Category: MG90 effectors
  REGION 1..382: note = Description: MG90-85 effector
MAPGSSASRAHVQPAAADLDINIMTPAEIKEGLDQYVIGQDEAKRVLSVSVYNHYKRILSGKGGDVELQKSNVLLLGPSGVGKTLLAQTLAKMLGVPFAIADATTLTEAGYVGEDVENILLKLIQAADFDVQKAQIGIIYIDEIDKITRKSENPSITRDVGGEGVQQALLKILEGTVSNVPPQGGRKHPQQEFIQIDTTNILFICGGAFDGLDKYILRRTDKSALGFGSALKDNSTEAERALLRKVEPHDLVKFGLIPELIGRLPVITVLDDLDEDALVRVLKEPRNSLVKQYKELLGMDNVELTFTDEALHAIARKTIERKTGARGLRSVMESILLPIMYEVPSDATIIRVTVDEDTVEGGEAHLEYGAVRKRYKNQAALS

SEQ ID NO: 2763 - protein, 427 aa, unidentified
  REGION 1..427: note = Description of Unknown: uncultivated organism sequence
  REGION 1..427: note = Category: MG90 effectors
  REGION 1..427: note = Description: MG90-86 effector
MEKEGKIYCDFCGKEIEPGEFGATGINGVFICQDCLKEFHESVMAQDTYLESEKKKQEREEVEKEDFQIPRPSMIKAHLDKYIEGQDYAKRVLSVAVYNHYKMLRAKHSGEYNNKDVELEKSNILLCGPTGSGKTAVLRALSKYLKVPFTMADITSYSSAGYVGKDVETIIRDLIVAADGDVKAAERGIVYIDEIDKTSRKGENLSTTSDPGHEGVQQALLKLLEGQMVEVPNKGRRLHPESNNTTMVNTANILFIVGGAFEGIEKIVSQRLHQHSSSMGFGAKLEDKKNHQYNDFIEKVTTEDFRKFGMLPELLGRVPVIAPMKQLSEEQLVHILYRPKNALVKQYQELLSQDNVDLKFTQKALKSIAHDAIKRKTGARGLRGIMEDILNPVMFEVPDKDVDAVVVDADDDDKIKIEYKDLKKEAV

SEQ ID NO: 2764 - protein, 416 aa, unidentified
  REGION 1..416: note = Description of Unknown: uncultivated organism sequence
  REGION 1..416: note = Category: MG90 effectors
  REGION 1..416: note = Description: MG90-87 effector
MGRQTVRYRYRIYPTRGQEWAANRLFGCCRVLYNDVIDLFRSRFDPSNRTLMPTQSQAQSMLIAQAKKTPERAWLTEVSNVALIQMFRDAWQSCWNGVRKDRRQRFARYRSLKHNPVNSARFTRNGFTVRPNGVYLAKIGTVKTKWSRRLPSTPSSCTLIHEPNGRWYVSFVVERGTTPLPENGVFAGIDMGLSDMAAVVTTDGRRWKIGNPRNYTLLQKRIVRLQKHLAGQEKGSRRYARTRKRIAMLYAKAHDMLDDYQNKNVLHIVRETQTVGVETLDVHGIAVSHGRSARDAAIRSFLNKLEWKSEQYGRTVKHIGRWEPSTRLCSQCKHYVDGGIPEHVRVWQCADCGTILDRDWNAALNILDAAGLAESLNARGGSVRPDLASAGNGGTRGSANPSERRNVPSRRGIPVL

SEQ ID NO: 2765 - protein, 367 aa, unidentified
  REGION 1..367: note = Description of Unknown: uncultivated organism sequence
  REGION 1..367: note = Category: MG90 effectors
  REGION 1..367: note = Description: MG90-88 effector
MRELIYRAKRMDAMLDFDKTPSQLKKGLDEYVVGQEEAKKILSVAVYNHYKRLRAEMRNVGDEEYPDVEIEKSNVLLIGPTGSGKTYLARTLAKMLNVPFAIGDATTVTEAGYVGEDVENLVLNLVRAADYNIERAQCGIVYIDEIDKICRKNENVSITRDVGGEGVQQALLKILEGTVCNIPPKGGRKHPDQQYLRVDTRNILFICGGAFVGLDKIIARRTESKVLGFNSDIAEDSKSEAQILKKVQPEDLVKFGFIPEFIGRLPVVCSLAGLTESDLVHILTKTKNSLIKQYSKLLSLDGAKLRFTDGAVKAIARKAMDFGTGARALRSIMESVMLNIMYELPDQKKSGEVVIDESMINSASRAE

SEQ ID NO: 2766 - protein, 411 aa, unidentified
  REGION 1..411: note = Description of Unknown: uncultivated organism sequence
  REGION 1..411: note = Category: MG90 effectors
  REGION 1..411: note = Description: MG90-89 effector
MFETNIPERRCSFCGRGQNDVEALITGPKGVAICNVCVDECYKMLHEKEEKKKGAPVKIDKLPTPKEIKEFLDQYVIGQEEAKKVLSVAVYNHYKRIMSGGTVDDVELEKSNILLIGPTGSGKTLLARSLAKLLDVPFAIADATTLTEAGYVGEDVENILLRLIQAADYDIEKAERGIIYIDEIDKIARKSENPSITRDVSGEGVQQALLKILEGTIANVPPQGGRKHPHQQYIQIDTSNILFICGGAFVGLEDIIARRLGKGAMGFTADVDKKKMERDELLKHVEPDDLVKFGLIPELIGRLPVIATLKELTEDDLVRVLTEPKNALVKQYKKMLELEGVELEFTEDALREIAREAIRRKTGARGLRAIMEKLMTDVMFEVPTRKDVKKVIIDAEAVKTGKPKYELTKAS

SEQ ID NO: 2767 - protein, 403 aa, unidentified
  REGION 1..403: note = Description of Unknown: uncultivated organism sequence
  REGION 1..403: note = Category: MG90 effectors
  REGION 1..403: note = Description: MG90-90 effector
MKRCSFCGREQSKVEALISGPGGVAICNYCVDECYELIHGEKQKKGAPVKIDKLPTPKEIKEFLDQYVIGQEEAKKVLSVAVYNHYKRIMSGGSVDDVELEKSNILLIGPTGSGKTLLARSLAKLLDVPFAIADATTLTEAGYVGEDVENILLRLIQAADYDIEKAERGIIYIDEIDKIARKSENPSITRDVSGEGVQQALLKILEGTVANVPPQGGRKHPHQQYIQIDTSNILFICGGAFVGLEDIIARRIGKGAMGFTADVDKKKMERDELLKYVEPDDLVKFGLIPELIGRLPVIATLKELKEEDLVRVLTEPKNALVKQYKKLLEMEGVELVFTEEALREIAREAIRRKTGARGLRAIMEKLMTDVMFEVPTRKDIKKVIIDAEAVKTGKPKYELTKAS

SEQ ID NO: 2768 - protein, 411 aa, unidentified
  REGION 1..411: note = Description of Unknown: uncultivated organism sequence
  REGION 1..411: note = Category: MG90 effectors
  REGION 1..411: note = Description: MG90-91 effector
MFETGIPERRCSFCGKGQSEVEALITGPKGVAICNQCVDECYKLLHEKEEKKKGAPVKVDKLPTPKEIKEFLDQYVIGQEEAKKVLSVAVYNHYKRIMSGGTVDDVELEKSNILLIGPTGSGKTLLARSLAKLLDVPFAIADATTLTEAGYVGEDVENILLRLIQAADYDIEKAERGIIYIDEIDKIARKSENPSITRDVSGEGVQQALLKILEGTIANVPPQGGRKHPHQQYIQIDTSNILFICGGAFVGLEDIIARRIGKGAMGFTADVDKKKMERDELLKHVEPDDLVKFGLIPELIGRLPVIATLKELTEEDLVRVLTEPKNALVKQYKKMLELEGVELEFTEDALREIAREAIRRKTGARGLRAIMEKLMTDVMFEVPTRKDVKKVIIDAEAVKTGKPKYELTKAS

SEQ ID NO: 2769 - protein, 453 aa, unidentified
  REGION 1..453: note = Description of Unknown: uncultivated organism sequence
  REGION 1..453: note = Category: MG90 effectors
  REGION 1..453: note = Description: MG90-92 effector
MSEFVDEMLGKMMGGHEPSDSNGSTARCSFCGKKGGKDSLLVMSRSSKGIFICKDCIDSYHMKLQEEEKSSTGAKNFQKTIEGQKARIAPPVRIKKFIDDYVIGQETAKKTIAVSIYNHYKMVNMKHDLAESGNKDAGLDLSKSNLLIVGPSGSGKTHLLRVVARMLNIPFVIEDACSFTASGYVGRDVETMLRDLVDAAGGNIKAAERGIIYIDEIDKISRKGENPSTTSDPGNEAVQQGLLKLIEGNVVEVPVKGQRNHPQAETIKVNTENILFIVGGSFEGIEKIISKRVHKSAGRIGFFGETRNMHEQFNDLILEISTDDLRKFGMLPEFLGRLPVICPMQELTEDELVRILTEPKDAIVRQYRMLMGADGITLEFTDEALRKVAKEAIERKVGARGLRSIIEKILRPIMYSAPTDNDLESVVIDAGTDSEENYKVIRNYRNTADAMEA

SEQ ID NO: 2770 - protein, 474 aa, unidentified
  REGION 1..474: note = Description of Unknown: uncultivated organism sequence
  REGION 1..474: note = Category: MG90 effectors
  REGION 1..474: note = Description: MG90-93 effector
MKDYEEVKDTKDITEETEPKDDYEDVCYLCRRPESKAGKLIRLPMEGICICPDCMQRSFTMMGNTNINYEDLMKNMNLQDMFPGNIQDGIPKSQRLKKKKPKEKNEPVIDLKQILPPHQIKARLDDYVIGQDYAKKVMSVAVYNHYKRVATNTMDEIEIEKSNMLMIGPTGCGKTYLVRTLARLLDVPLAIADATSLTEAGYIGDDIESVVSKLLAAADNDVEKAERGIIFIDEIDKIAKKKNTTSRDVSGESVQQGLLKLLEGSDVEVPVGASSKNAMVPLTTVNTRNILFICGGAFPDLDGIIKARLNKTSGIGFGAMLSDAHDQDSDIVSQVTIDDLREFGMIPEFIGRLPVIFTLKGLDEAALVKILKEPKNAIIKQYQKLLALDEVDLQFDDGALEAIAKRAIEKKTGARALRSIIEELMLDIMYQIPKDDNIGRVTITQPYVEHRGGPLIEMRGIFSLPNKTPVAGIE

SEQ ID NO: 2771 - protein, 690 aa, unidentified
  REGION 1..690: note = Description of Unknown: uncultivated organism sequence
  REGION 1..690: note = Category: MG90 effectors
  REGION 1..690: note = Description: MG90-94 effector
MKHLLNYKYEIFPTKPQREQLNRTFRQTKIQWNKAVTIRKKLKSALMSGQFEHVIKTYLSAAADKSNTSSNRKKAILKVQQSLPQIDFETAAKLYDIKNLVGKVLGELTPRHADIAFLVNELKTSHSKELAERKAAIANGATGKSLPKLKTYWQMITAIGQLAGFKAKTFMDDSFESPSGMALSAIRFNVSGTKNAVRWNQAVQPKPGQRTYGATGEPRYKRRSDGFAYQIHDAAPADLIRSKKKNGHQIHLKALHKGNAWVDFAYHRPVPVDDKIKQFTVMTKAGRYFIALSTEVPTSAWAIAPMEAGWHAGIDPGAQTALTVGLVNSTSGEIKHLAIHYEFLEKSLTKLETLQQALSLKQGPRRKRTEVEIQEALTQYSKKRAVQKLTNAEKEKTLAKERERLERRMVFQGASRKWRQGAKSVSSLMLKIANQRQDVLHKISRALAEGCDVVGIGHWEPEREVSFRKKLRLLKKQVKAGVAGATATLKEHIEEKSKEGPKGIKKRRRGGRDRSIATLRMLINEKAVRSGVKAFTDINESYSTMTCSSCGEATGPTGIVNLGIREWQCGNCNVSHHRDLNSAFNILKKTELELAAAQAAAPATGSTATRTDAQGAQSAPGSDAGSGYLATGHHGRGGSFFYEHAEVSLPDLWKEEVPRALKSLIQMGVVRALTLQRADEKSSKSPPAQT

SEQ ID NO: 2772 - protein, 426 aa, unidentified
  REGION 1..426: note = Description of Unknown: uncultivated organism sequence
  REGION 1..426: note = Category: MG90 effectors
  REGION 1..426: note = Description: MG90-95 effector
MNDIVDIDENQHYCCFCGKAISDEATVVQGDDNVLICFDCIKEIYEENIERVEQRKKNALINKLNKDVTPSSIKRYLDEYIIGQESAKKVLSVAVYNHYKSLRIKSKDNAVDLEKSNIILLGPSGCGKTAILKALSKFLNVPFAMADASTLTAAGYVGADVETVLQKLILEANGDIKKAQKGIVYIDEIDKIARKGENLSTTADPGHEGVQQALLKMIEGSVVSVPPKGQRNHPQADMIRIDTSNILFIVGGAFENIDKIVEKRIKSSKGSMGFNGVLKDTSKTYNDFIKEVRTEDLKKFGMLPELLGRLPIICPMEELDKKALIRILTEPKNALVKQYQAILQADNVKLSFTEKALEYIADKAIKRKTGARSLRSILEEELNQTMYELPDKKDITAVLVAVENNNICIEYIKEIEGVKIYDNICK

SEQ ID NO: 2773 - protein, 479 aa, unidentified
  REGION 1..479: note = Description of Unknown: uncultivated organism sequence
  REGION 1..479: note = Category: MG90 effectors
  REGION 1..479: note = Description: MG90-96 effector
MSDYKDKDELTKTEDTSSDHKKDDSHKEYEDICYVCRRPESKAGKMIHLPINNICVCADCMQKSFDTMNNSGMSDMMNMNNINFQDLMNFGMPMMGGPDMMPKSQKLKKKKPKEEAQPVFDIKKIPAPHVIKAQLDDYVIGQEYAKKVMSVAVYNHYKRVATNTMDDIEIEKSNMLMIGPTGCGKTYLVRTLAKLLDVPLAITDATTLTEAGYIGDDVESVVSKLLAAADNDVEKAERGIIFIDEIDKIAKKKNTTSRDVSGESVQQGLLKLLEGSDIEVPVGASSKNAMVPMTTVSTRNILFICGGAFPDLENIIKERLTQQSSIGFIADLKDKYDNDKNLISKVTIDDLRTFGMIPEFIGRLPVIFTLQGLSEDMLVKILKEPKNAILKQYQKLLALDEVDLQFSDDALTAIAAKAMEKKTGARALRSIIEEFMLDIMYEIPKDDNIGRVTITREYIENTGGPVIEMRGALPVTKNS

SEQ ID NO: 2774 - protein, 351 aa, unidentified
  REGION 1..351: note = Description of Unknown: uncultivated organism sequence
  REGION 1..351: note = Category: MG90 effectors
  REGION 1..351: note = Description: MG90-97 effector
MPKPKDIKEYLDQYIIGQDDAKRYMSVAVYNHYKRLAQANTDKKDQDDVEIEKSNIVMVGSTGTGKTLLARTIARLLDVPFTIVDATVFTEAGYVGEDVESILSRLLQVADYDVAKAERGIVFIDEIDKIARKADNPSITRDVSGEGVQQGLLKLLEGTMVNVPPKGGRKHPDQDYIHVDTRNILFICGGAFDGIEKRIAQRLNAHTVGYNSVQNAKKIDPKNLMKYVEPQDLKSFGLIPEIIGRLPVLTYLNPLDKEALTRILVEPKNSIVKQYIKLFAMDGVKLTFKQDALDYIVDKAVEFKLGARGLRSIVETIMMDAMFEIPSSGEKQFEVTKEYAENQMEKRGNLA

SEQ ID NO: 2775 - protein, 411 aa, unidentified
  REGION 1..411: note = Description of Unknown: uncultivated organism sequence
  REGION 1..411: note = Category: MG90 effectors
  REGION 1..411: note = Description: MG90-98 effector
MFETKIPMRRCSFCGRDQSKVEALITGPGGVAICNYCIDECYEMIHQEEERKGAPSISIDKLPTPKEIKEFLDQYVIGQDEAKKVLSVAVYNHYKRIMSGKDTDDVEIEKSNILLIGPTGSGKTLLARSLAKLLDVPFAIADATTLTEAGYVGEDVENILLRLIQAADYDIEKAERGIIYIDEIDKISRKSENPSITRDVSGEGVQQALLKILEGTIANVPPQGGRKHPHQQYIQIDTTNILFICGGAFVGLEDIIARRIGKGAMGFTADVDKKKLNRDELLKHVEPDDLVKFGLIPELIGRLPVVATLSELKEEDLVRVLKEPKNALVKQYKKLLELEGVELEFTDDALRAIAKEAIRRKTGARGLRAIMEKIMTDVMFEVPTRKDIKKVIIDADSVKTGKPKYELVKAS

SEQ ID NO: 2776 - protein, 424 aa, unidentified
  REGION 1..424: note = Description of Unknown: uncultivated organism sequence
  REGION 1..424: note = Category: MG90 effectors
  REGION 1..424: note = Description: MG90-99 effector
MENKIVCEMCGREIPAQTTVVQSIKGQVFCADCISKCYKALKNMEPHIEKAEKTRDLDTKAVKLAKPTELKKYLDGFIEGQEKAKQVLSVAIYNHYKKLVMRASGKATKGIELEKSNVLLIGPSGCGKTAILRSLAKALKVPFVMADATAYSSSGYVGRDVEMIIRDLLNAAGGDVEAAERGIVYIDEIDKIGRKGENVSTTADPGHEGVQQAILKLLEGSVLEIPDKGQRVHPDAKMTRVNTENILFIVGGAFEGIEKIIAARLRKQLDAGTMGFGSQLVDTKNQRFNEFIEQVTTDDLKKFGMLPEVLGRVPIIAPMKELSEEQLVHILYHPKNALIRQYKELLSYDNVVLDVTEEAMRAIAKEAIARKTGARGLRGIMEEILGPVMFSAPDRGEDITLDVDKDGKIAVIYQKHEDVKREAV

SEQ ID NO: 2777 - protein, 403 aa, unidentified
  REGION 1..403: note = Description of Unknown: uncultivated organism sequence
  REGION 1..403: note = Category: MG90 effectors
  REGION 1..403: note = Description: MG90-100 effector
MSILEDESSLANRKTGYERETQAKILPKPQEIKKQLDNYVIGQEQAKIALSVAVYNHYKRIYFGKSDDVELSKSNVLLLGPTGVGKTMLAQTLARILDVPFAIADATTLTEAGYVGEDVENILLRLIQAADFNIELAERGIIYIDEIDKIARKSENPSITRDVSGEGVQQALLKILEGTVSNVPPQGGRKHPHQEFIQVNTKNILFICGGAFDGLEKIIERRLDQKSIGFGANVQGKKDKDISKILHEVQPHDLLKFGIIPELVGRLPVIASLNALKREDLVRILTEPKNALVKQYKKLMEYDEVELEFQPEALEAIADKAIERNIGARGLRAVMEGILTPMMYDIPSDPTVVKAVITKDCVEGRSGPELTHDPKKINYSVKLNTGKGEGRPASGSSTPASAS

SEQ ID NO: 2778 - protein, 423 aa, unidentified
  REGION 1..423: note = Description of Unknown: uncultivated organism sequence
  REGION 1..423: note = Category: MG90 effectors
  REGION 1..423: note = Description: MG90-101 effector
MAEEIKESVCSFCGKHYTDNDKTILFSADTPGALICYDCAKEIYSNYKDKIDSMREVSGSVQADQKWTPQSMKEYLDQYIIGQEKAKEILCTAVYNHYQILKMREDGNKNAVEVEKSNVIMAGPTGVGKTAIIKRLAKIMQVPCVIADSTSLTSAGYVGDDVESVIQSLLIEADYDVEKTQKGIVYLDEIDKTNRHGENPSTTADPGHEGTQQALLKLIEGTVANVPLKGQRKHPNADMVKVDTSNILFIVGGAFEGIEKIITRRHNSGMAGVGFGSVLVNDKDKKKSYNEIIGDLRVEDLKKFGMTPELLGRLPVICPMKELTEEQLVEILSKPKNSLLKQYQTLFKAQGVDLTFDDEALKTVAHLAIERKTGARGLRGIMESILSHEMYSIPSDDSIGSVTVTGTDFEIVRGEKPAEEISA

SEQ ID NO: 2779 - protein, 354 aa, unidentified
  REGION 1..354: note = Description of Unknown: uncultivated organism sequence
  REGION 1..354: note = Category: MG90 effectors
  REGION 1..354: note = Description: MG90-102 effector
MEELLKPAQIKDFLDQYVIGQDDAKRYMAVAVYNHYKRLLYAPKEDEVEIDKSNIVLVGPTGTGKTLMARTIAKLLNVPFTIVDATVLTEAGYVGEDVESILSRLLQVADYNVEQAERGIVFIDEIDKIARKGDNPSITRDVSGEGVQQALLKILEGTTVNVPPQGGRKHPDQKFIQVDTRNILFICGGAFDGIERKIAQRLNTRAMGYGRAGADPIDRSNLMQYVMPQDLKSFGLIPELVGRLPVLTYMQPLGREALRSILTEPKNAIVKQYVRLFEMDGVKLAFDDEVLDYIVDRAIVYKLGARGLRSICEAVMMDTMFDIPSSGCKEFRVTLPYAKEKIEKANFVELKKVG

SEQ ID NO: 2780 - protein, 439 aa, unidentified
  REGION 1..439: note = Description of Unknown: uncultivated organism sequence
  REGION 1..439: note = Category: MG90 effectors
  REGION 1..439: note = Description: MG90-103 effector
MIDWGLQQHVTSKLTVPKPKDIKAKLDEYIVKQDYAKKVLAVAVHNHYKRIMSPAKDGIELGKSNILLIGPTGTGKTLLAQTLAKILDVPFAMADATSLTEAGYVGDDVENVVLNLVNAADGDIERACRGIIYIDEIDKIAKKGENPSITRDVSGEGVQQSLLKMIEGTVAAVPPKGGRKHPQQEFLRVDTTNILFICGGAFVGLADIIDKRTSLGSMGFNANVVNKDKRDLSALYHALEPEDLLKFGLIPELVGRLPVVATLEPLDEAALTEILTEPKNSLVKQYKKMFKIDGVDLEFDDDALAEIAKLAIKKESGARGLRSILENAMMPFLYAVPGMPNMKKLVVTSDIIAKQGDLSQIDELNARYNAKQDDKSSNASTKTSDAKSDADQSDDAKSGSEQSDDKSISSDDTIDDKSINADDKKAKSARAKKTKKTDP

SEQ ID NO: 2781 - protein, 408 aa, unidentified
  REGION 1..408: note = Description of Unknown: uncultivated organism sequence
  REGION 1..408: note = Category: MG90 effectors
  REGION 1..408: note = Description: MG90-104 effector
MTAGNNNQTVRYNYRLYPTKTQETVLNRLFGCCRVVYNDTIDFFNNNFNPNNQSKLPTASKASKQILTNAKKTTKRAFLKEVSSVALQQEFRNAWLACWHGVSHTSNQKPAKRKTKKHNPVNSANFTSNGFSVNQHGVYISKIGVIKTKWSRPMPSEPTSCTISHARNGRWYASFVVKRPKTPFKQCDNNAGIDMGLTDMATIVNTRGERWKIANPRNYAKIQDKIGRLQRHLSKQTKGSKRYERTRHQIALLYSKAHDALADYQWKNVLNIIRETQAIGVETLDIQSMKAKHGKSVRDAAMRSFLNKLGSKAEEHDRSIIQLNQWLATTKLCALCKYKLKAGIPEYARHWVCPKCGAHLDRDYNAALNILDAAGLAESLNARGGGVRSFLASAENGCSRRTAYHPSF

SEQ ID NO: 2782 - protein, 438 aa, unidentified
  REGION 1..438: note = Description of Unknown: uncultivated organism sequence
  REGION 1..438: note = Category: MG90 effectors
  REGION 1..438: note = Description: MG90-106 effector
MPKDEFTTRRLHRCSFCYKTQDQVRRLVAGPDGYSGDEGIKLCYDIIADDVTPMSTAAPDSPSLPLPSEMKAVLDEYVIGQDEAKRTLCVAVYNHYKRINAPQKAGDVELQKSNILMVGPTGCGKTYLAQSLARILNVPFAIADATALTEAGYVGEDVENILLRLIQAADGDIRAAQRGIIYIDEIDKISRKGENVSITRDVSGEGVQQALLKILEGTVANVPPQGGRKHPQQEFMQIDTTNILFICGGAFDGLAPIIQQRIGSRTLGFGAKLTGDSAADVGNVLRQLRPEDLMKFGLIPEFVGRLPVVVTLDQLDESALVRILTEPRNALVKQYAKLLELDGVSLSFDQDALTAIAHMAMQQKSGARGLRAIIEKALLDTMFDLPGQNDVTACHVTGDVITAGAKPQLTRAAHSARTLRSKKPAALPEEKKEAPDAV

SEQ ID NO: 2783 - protein, 394 aa, unidentified
  REGION 1..394: note = Description of Unknown: uncultivated organism sequence
  REGION 1..394: note = Category: MG90 effectors
  REGION 1..394: note = Description: MG90-107 effector
MEEGSAEKGHVTVVYPAYPNGAQERELLRTLDVVRGLYNHFLAECIADVVEGDRFPTPMEMNKGITEMRSRDEELRSVAVFILRDAPLRVHAAMTRFAKLSAMSGELRLPRFKSESRYRSLAFDPKSVSFDGRRIVLGRWMGLRCGNIDRSHRLHRPEGGRVVTARIVRRGSDRWYVHVTFEVDKRYRSGIDLSDPAQPEAYDLGLCDIITDTKGEKVVAPDLYARHEREIARLQRQIESMEDGPKRRKKQRRLAVLHERIRRRRDGYLDEVANQMVSGHSAVILEDLRLRRMMERDDNPAPRRKLFTEAALGILVRKVEAKAERACIPLVKVDPAYTTRTCSCCGHVGGRMPLTQRVFSCPRCGLEMDRDHNAALNILGSGMGTLRGSAEPSG

SEQ ID NO: 2784 - protein, 392 aa, unidentified
  REGION 1..392: note = Description of Unknown: uncultivated organism sequence
  REGION 1..392: note = Category: MG90 effectors
  REGION 1..392: note = Description: MG90-108 effector
MSRRAGGSEDKWFVTRVYPAYPNRTQERELLRQLDVARGVYNHFADTCIHCLIDGVHIPDPMEMNREFTLMRADDCLLRSVNSYTLREGINRVWQAVERCERRSLADGELHVPRIKTPPRFRSICFDPKSSKIENSRIRLNRDLSVRCRNLVRPRNGRAVTVRAVRRGTGRWYICITYETDRVVRGEMDVGEPDRAEGYDLGLVDLITDSSGNKIRTPDFFREAEAELAHLRRQLSRLEEGTAKWLKTRRRIARIEERIRSRRDGCLDRVADWMVSGKPTVVVEDIDVRRLASREDGTLVRRKRFTEAAWATLVGKAERKARKTDVRLIRVSPAYTTRTCSRCGHVGDGIPLSERMFRCPACGLEMDRDRNAARNILGSGMGTQRCTAEPSG

SEQ ID NO: 2785 - protein, 391 aa, unidentified
  REGION 1..391: note = Description of Unknown: uncultivated organism sequence
  REGION 1..391: note = Category: MG90 effectors
  REGION 1..391: note = Description: MG90-109 effector
MEEGSADKGHVTIVYPAYPNVGQLLRTLGVVRGLYNHFLAESIADVMEGDRFPTPREMNKAITVMRGRDIGLGSVAVFTLRDAPLRVHAAMTSFAKLSARSGELRLPRFKSESRYRSLAFDPKGVKFDGRRIVFGKWMKLRCGNLDRNRKLHRPEGGRIVTARIVRKGSGRWYVHITFEVDRRYRSEIDLSDPAEPEAYDLGLCDIITDSKGERIGAPDLYARHENEIARLQRQIASMEDGPKRRKKPRRLSVLHERIRRRRDGYLDEVADRMVSGHSAVILEDLRLRRMIERDDSPAPRRKLFTEAALGTLVRKVEAKAERACIPLVKVDPAYTTRRCSCCGHVGEKMPLSLRVFSCPRCGLEMDRDHNAALNILGSGMGTLRGSAEPSG

SEQ ID NO: 2786 - protein, 411 aa, unidentified
  REGION 1..411: note = Description of Unknown: uncultivated organism sequence
  REGION 1..411: note = Category: MG90 effectors
  REGION 1..411: note = Description: MG90-110 effector
MFETQVPMRKCSFCGRPQNEVEALITGAGGVAICNFCIDECYKMLHEGEEKKKGAPISIDKLPTPKEIKEFLDQYVIGQEEAKKVLSVAVYNHYKRIMAGGSVDDVELEKSNILLIGPTGSGKTLLARSLAKLLDVPFAIADATTLTEAGYVGEDVENILLRLIQAADYDIEKAQRGIIYIDEIDKIARKSENPSITRDVSGEGVQQALLKILEGTIANVPPQGGRKHPHQQYIQIDTSNILFICGGAFVGLEDIIARRIGKGSMGFTADVDKKKMERDELLKHVEPDDLVKFGLIPELIGRLPVIATLKELKEEDLVRVLTEPKNALVKQYKKLLELEGVELEFTEEALREIAREAIRRKTGARGLRAIMEKLMTNVMFEVPTRKDIKKVIIDAEAVKTGKPKYELTKAS

SEQ ID NO: 2787 - protein, 385 aa, unidentified
  REGION 1..385: note = Description of Unknown: uncultivated organism sequence
  REGION 1..385: note = Category: MG90 effectors
  REGION 1..385: note = Description: MG90-111 effector
MLLSGIEGYICKDCSDQAVKIFKEQHQHRPGKGYDPNTPIPTPTEIKEFLDLYVIGQDAAKRVLSVAVYNHYKRLKYNALNGDKNDVEIEKSNIILVGETGTGKTLLARTIARLLKVPFCIADATTLTEAGYVGDDVENVLVRLLQAADYDVAAAERGIVFIDEIDKIARKSENTSITRDVSGEGVQQALLKLLEGAEVSVPPEGGRKHPEQKLINVNTRNILFICGGAFDGVERSIAARLNSNVIGFKGDEKRQELDRENMLQYVQPMDLKKFGLIPELVGRFPVLTHLEALDRDALRRILTEPKNALTKQYEALFSMDGVELKFDPAVLDMIVDRAVEYHLGARGLRGIMEGIMTDLMFDLPQMPKGGTYTLTPEVAKAKMKL

SEQ ID NO: 2788 - protein, 340 aa, unidentified
  REGION 1..340: note = Description of Unknown: uncultivated organism sequence
  REGION 1..340: note = Category: MG90 effectors
  REGION 1..340: note = Description: MG90-112 effector
MVGQDRAKRSIAVAVYNHYKRILGKGDPNVDIEKSNILMIGPTGSGKTYIARSLAKILGVPFAIADATTLTEAGYVGEDVENVLLKLINAADNDIKRAEKGIVYIDEIDKIARKGENTSITRDVSGEGVQHALLKILEGTVASVPPQGGRKHPQQEMLKIDTSNILFICGGAFAGIEKILAKETKKNAIGFGAAFEEKKEMTLSEQLRGLTPQDLMKFGLTPEFVGRLPVFVALDELDEEAMVRILTEPRNSLVKQYQKLLEIDGVELEFEPEALREIAQTAMRKNTGARGLRAIMENVMEDIMFDMPDEENVKKCIVTKAAVLGEEKPVLVRGKQDRSA

SEQ ID NO: 2789 - protein, 426 aa, unidentified
  REGION 1..426: note = Description of Unknown: uncultivated organism sequence
  REGION 1..426: note = Category: MG90 effectors
  REGION 1..426: note = Description: MG90-113 effector
MNDIVDIDENQHYCCFCGKAISDEATVVQGDDNVLICFDCIKEIYEENIERVEQHKKNALINKLNKDVTPSSIKRYLDEYIIGQESAKKVLSVAVYNHYKSLRIKSKDNAVDLEKSNIILLGPSGCGKTAILKALSKFLNVPFAMADASTLTAAGYVGADVETVLQKLILEANGDIKKAQKGIVYIDEIDKIARKGENLSTTADPGHEGVQQALLKMIEGSVVSVPPKGQRNHPQADMIRIDTSNILFIVGGAFENIDKIVEKRIKSSKGSMGFNGVLKDTSKTYNDFIKEVRTEDLKKFGMLPELLGRLPIICPMEELDKKALIRILTEPKNALVKQYQAILQADNVKLSFTEKALEYIADKAIKRKTGARSLRSILEEELNQTMYELPDKKDITAVLVAVENNNICIEYIKEIEGVKIYDNICK

SEQ ID NO: 2790 - protein, 391 aa, unidentified
  REGION 1..391: note = Description of Unknown: uncultivated organism sequence
  REGION 1..391: note = Category: MG90 effectors
  REGION 1..391: note = Description: MG90-114 effector
MIYGPGIAKAQKKAAKKDGDKSLSSMKLLKPREIKEFLDDYVIGQDDAKISLAVAVYNHYKRIMSQEAAEKNLNDDDGVDLQKSNVLLLGPTGVGKTFLAQTLAKLLNVPFAIADATTITEAGYVGDDVENVLLRLIQAADFDIKAAERGIIYIDEIDKIARKSENTSLTRDVSGEGVQQALLKIIEGTVSNVPPQGGRKHPNQEVIQINTKNILFICGGAFDGLERQIQKRIGKAPIGFGGDIKAHHEIKDNIFKKVIPKDLVKFGMVPEFVGRLPVITVLDELDEDSLVKILTEPKNALIKQYKKLFDYDDIELEIEDGALVEIAKKAIAQKTGARGLRSILEGILMNTMFTVPSDGSIAKVTVTADCVLNGTQPILMNRRNKVVTIAV

SEQ ID NO: 2791 - protein, 435 aa, unidentified
  REGION 1..435: note = Description of Unknown: uncultivated organism sequence
  REGION 1..435: note = Category: MG90 effectors
  REGION 1..435: note = Description: MG90-115 effector
MAKYDDPKDRTIRCSFCGRTQDQVGMLIQGPDAFICDSCIASCLEIIESGESDSIGKPAGKKKPTASPRILPKPNELKARLDEYVIGQDEAKIALSVAVYNHYKRIYRKPKTDVEITKSNVLLLGPTGVGKTFLAQNLAKTLDVPFAIADATTLTEAGYVGEDVENILLRLIQAADFDVEKAERGIIYIDEIDKIARKSENTSITRDVSGEGVQQALLKILEGTVANVPPQGGRKHPQQEFIQIDTSNILFICGGAFDGIERIGEKRLGNSVLGFGSELIVKSELDHDTIMQKVIPQDLIKFGLIPELVGRMPVLTALRNLDEDALVRILKEPKNALFKQYKALFEIDKVELEFTDDAFRAIARSALEKNTGARGLRAIMEKVLQPVMYEIPSDPSVTRVTVTAACVNGEGNPAIERDPTRLAPPKENNLKPTIA

SEQ ID NO: 2792 - protein, 427 aa, unidentified
  REGION 1..427: note = Description of Unknown: uncultivated organism sequence
  REGION 1..427: note = Category: MG90 effectors
  REGION 1..427: note = Description: MG90-116 effector
MDNHKKNVICSFCGKKVSEDNFVAQGIEENIFICQDCINEIHKTVADADSFIETIEESRKKEEKKMSKLPRPSEIKAHLDQYIIGQDYAKRVLSVAVYNHYKMLDVKLNKKAINKDVELEKSNVLLAGPSGSGKTAILKALAKLLKVPFVIADATEYSEAGYVGKDVECIARDLISAANGDIRKAERGIVYIDEIDKTGRKGENLSATADPGHEGTQQALLKLLEGSVIDVPMDGRRLNPESRNLQKIDTTNMLFIVGGAFEGIDKIIAKRKRQGKNTIGIGANLTDRKNDQFNDFIEDLTTEDLKKFGMLPEILGRVPVIAPLKELTEDQLVHILYQPKNALVKQYQELLAQDGVELEVTDAALTAIAKKAIKRKTGARGLRGIMEDILNPVMFSIPDKDEDYVLIDAVDGKLEISYQKKIKREAV

SEQ ID NO: 2793 - protein, 346 aa, unidentified
  REGION 1..346: note = Description of Unknown: uncultivated organism sequence
  REGION 1..346: note = Category: MG90 effectors
  REGION 1..346: note = Description: MG90-117 effector
MIGQDEAKRVLAVSVYNHYKRILSGKGSDVELQKSNVLLLGPSGVGKTLLAQTLAKMLGVPFAIADATTLTEAGYVGEDVENILLKLIQAADFDVQKAQIGIIYIDEIDKITRKSENPSITRDVGGEGVQQALLKILEGTVSNVPPQGGRKHPQQEFIQIDTTNILFICGGAFDGLDKYILRRTDKSALGFGSSLKDNSSEAEKALLRKVEPHDLVKFGLIPELIGRLPVITVLDDLDEDALVRVLKEPRNSLVKQYKELLSMDNVELNFTDEALHAIARKTIERKTGARGLRSVMESILLPIMYEVPTDATIIRVTVDEDTVEGGEAHLEYGAVRKRYKNQAALS

SEQ ID NO: 2794 - protein, 403 aa, unidentified
  REGION 1..403: note = Description of Unknown: uncultivated organism sequence
  REGION 1..403: note = Category: MG90 effectors
  REGION 1..403: note = Description: MG90-118 effector
MRKCSFCGRPQNEVEALITGAGGVAICNFCIDECYKMLHEEEQKKGAPVSIDKLPTPKEIKEFLDQYVIGQEEAKKVLSVAVYNHYKRIMAGGSVDDVELEKSNILLIGPTGSGKTLLARSLAKLLDVPFAIADATTLTEAGYVGEDVENILLRLIQAADYDIEKAQRGIIYIDEIDKIARKSENPSITRDVSGEGVQQALLKILEGTIANVPPQGGRKHPHQQYIQIDTSNILFICGGAFVGLEDIIARRIGKGSMGFTADVDKKKMERDELLKHVEPDDLVKFGLIPELIGRLPVIATLKELKEEDLVRVLTEPKNALVKQYKKLLELEGVELEFTEEALREIAREAIRRKTGARGLRAIMEKLMTNVMFEVPTRKDIKKVIIDAEAVKSGKPKYELTKAS

SEQ ID NO: 2795 - protein, 393 aa, unidentified
  REGION 1..393: note = Description of Unknown: uncultivated organism sequence
  REGION 1..393: note = Category: MG90 effectors
  REGION 1..393: note = Description: MG90-119 effector
MEQEDKASGKKSKGKQKEDKHELIKPAELKEILDKYIIGQDEAKKTICVSVYNHYKKNFFGDEATADEIELQKSNVLLLGPTGVGKTMIAQTLANVLKVPFAIADATTLTQAGYVGEDVENVLLRLIQAADYDIEAAEHGIIYIDEIDKITRKSENTSITRDVSGEGVQQALLKIIEGTVSNVPPQGGRKHPNQEFIQINTKNILFICGGAFEGIDKLVMQRTSSSALGFGAEVKSKQDNKINEARHQGEPEDLDKFGIIPELVGRLPVIAVLDDLDEDALVKILSEPKNAILKQYSYMFSLDGIELEITDDAMRAIAKKAAERKTGARGLRTVVEEALSDIMFDAPSDDTISKVILTGECVTDGKAPEVIRDPSARKNRRNSEKKTAKKNPA

SEQ ID NO: 2796 - protein, 354 aa, unidentified
  REGION 1..354: note = Description of Unknown: uncultivated organism sequence
  REGION 1..354: note = Category: MG90 effectors
  REGION 1..354: note = Description: MG90-120 effector
MDQYVIGQDAAKKVLSVAVYNHYKRVLAGKDLDVELQKSNILLLGPTGSGKTYLAQTLAKILNVPFAIADATTLTEAGYVGEDVENILLKLIQAADYDIERAQHGIIYIDEIDKITKKSENVSITRDVSGEGVQQALLKILEGTEASVPPQGGRKHPQQELIPIDTTNILFICGGAFDGLGKIIERRLDKGSIGFNSQIIEKTDKSEDELFKQVMPEDLTKFGLIPEFIGRVPVTVSLDFLDEKALERILTEPKNALIKQYKKLFELDGVELKFTDEAINTIAKKAVERKTGARGLRAILENAVMDIMYETPSDETIKECIVNEDVINGLADPELVYNSVIGKKKAKKNKDKTA

SEQ ID NO: 2797 - protein, 367 aa, unidentified
  REGION 1..367: note = Description of Unknown: uncultivated organism sequence
  REGION 1..367: note = Category: MG90 effectors
  REGION 1..367: note = Description: MG90-121 effector
MKIRFEEFKDEISTDILDSKTPKELLAILNDYVIGQDNAKRALSVAVYNHYKRINFMASKADEEVELQKSNILMIGPTGSGKTFLAQTLAKSLNVPFAIADATSLTEAGYVGEDVENILLKLLQAADYNVDRAERGIIYVDEIDKIAKKSENVSITRDVSGEGVQQALLKIIEGTVASVPPQGGRKHPNQEMIQLDTKNILFIVGGAFDGIEEIVKQRLGEKIIGFGFNNKALSEDMSYMQEIIAEDIQKFGLIPEFIGRLPIVAALESLTESDLVHILTQPKNALVKQYQRLLSFDNVELEFEDAALKAIAEKAIQRKTGARGLRSIIEEVMMDVMFEIPSMTGIRKVVITEDAVLGTNEPLLIGA

SEQ ID NO: 2798 - protein, 393 aa, unidentified
  REGION 1..393: note = Description of Unknown: uncultivated organism sequence
  REGION 1..393: note = Category: MG90 effectors
  REGION 1..393: note = Description: MG90-122 effector
MEQEDKASGKKSKGKQKEDKHELIKPAELKEILDKYIIGQDEAKKTICVSVYNHYKKNFFGDEATADEIELQKSNVLLLGPTGVGKTMIAQTLANVLKVPFAIADATTLTQAGYVGEDVENVLLRLIQAADYDIEAAEHGIIYIDEIDKITRKSENTSITRDVSGEGVQQALLKIIEGTVSNVPPQGGRKHPNQEFIQINTKNILFICGGAFEGIDKLIMQRTSSSALGFGAEVKSKQDNKINEALHQVEPEDLVKFGIIPELVGRLPVIAVLDDLDEDALVKILSEPKNAILKQYSYMFSLDGIELEITDDAMRAIAKKAAERKTGARGLRTVVEEALSDIMFDAPSDDTISKVILTGECVTDGKAPEVIRDPSARKNRRNSEKKTAKKNPA

SEQ ID NO: 2799 - protein, 496 aa, unidentified
  REGION 1..496: note = Description of Unknown: uncultivated organism sequence
  REGION 1..496: note = Category: MG90 effectors
  REGION 1..496: note = Description: MG90-123 effector
MQTKNPDSQTMDPKKARCVFCGKTADEVAGMIQSPDGTCICDECILYCTDVLARGGYLNGRHPSQGNMPDSFDGDFDGYEGHIAQAPFDDEEQGAPSAAEILAALPTPHELFDRLSQHVVGQEAAKRALSVAVYNHYKRISLGAESNDDDVELAKSNIMLLGPTGSGKTLLAQTLARTLQVPFAIADATTLTEAGYVGEDVENILLKLITAADFDIERAQIGIIYIDEIDKIARKAENLSITRDVSGEGVQQALLKIVEGTEASVPPQGGRKHPQQELIHIDTTNILFILGGAFVGLADIIGQRVGKKGIGFTSDVPQSKKHAEAELLEKVLPEDLNKFGMIPEFVGRIPVICSLDELTEDDLVHILTDPKNALVKQYVRMFEFENSELVFTPEALRAIAHEAVEHGTGARGLRAICERVLQDVMFDLPEHAGRGWLFARAISRAKRNPKSSRRPTRLSSPNKCHGLAACATGLFQYSALQANKLGAESGRAFQEL

SEQ ID NO: 2800 - protein, 338 aa, unidentified
  REGION 1..338: note = Description of Unknown: uncultivated organism sequence
  REGION 1..338: note = Category: MG90 effectors
  REGION 1..338: note = Description: MG90-125 effector
MIGQDDAKRYMSVAVYNHYKRLLHASGEASEVELDKSNILLVGPTGTGKTLMARTIAKLLNVPFTIVDATVLTEAGYVGEDVESILSRLLQVASYDVELAQRGIVFIDEIDKIARKSDNPSLTRDVSGEGVQQALLKILEGTVVNVPPQGGRKHPEQQFVQVDTRNILFICGGAFDGIEKKIAQRLNTRAMGYGRMNADSVDRNNLMQYLMPQDLRSFGLIPELVGRLPVLTYMEPLGREALRSILTQPKNAIIKQYEKLFEMDGVKLVFDDEVLDYIVDKAIEYRLGARGLRSICEAIMMDTMFDIPSSGERRFEVTLPYAREKFEKKKFLALKQVG

SEQ ID NO: 2801 - protein, 337 aa, unidentified
  REGION 1..337: note = Description of Unknown: uncultivated organism sequence
  REGION 1..337: note = Category: MG90 effectors
  REGION 1..337: note = Description: MG90-127 effector
MLAVSVYNHYKRILSGKGADVELQKSNVLLLGPSGVGKTLLAQTLAKMLGVPFAIADATTLTEAGYVGEDVENILLKLLQAADFDVQKAQVGIIYIDEIDKITRKSENPSITRDVGGEGVQQALLKILEGTVSNVPPNGGRKHPQQEFIRIDTTNILFICGGAFDGLDKYILRRTDRSALGFGSSLKDNSEDAQRALLRKVEPHDLVKFGLIPELIGRLPVITVLDDLDEDALVRVLKEPRNSLVKQYKELLSMDSVELEFTDEALHAIARKTIERKTGARGLRSVMEGILLPVMYDVPNDPTIIRVTIDKDTVEGGEAHLEYGAVRKRYKNQTALS

SEQ ID NO: 2802 - protein, 398 aa, unidentified
  REGION 1..398: note = Description of Unknown: uncultivated organism sequence
  REGION 1..398: note = Category: MG90 effectors
  REGION 1..398: note = Description: MG90-128 effector
MDIIADEDSLHRGRPQPKNKPRAEMVLPKPQEIKKQLDEYVIGQDEAKMTLAVAVYNHYKRIFFSGEDGGVEIAKSNVLLLGPTGVGKTYLAQTLAKLLDVPFAIADATTLTEAGYVGEDVENILLRLIQAADYDIERAEHGIIYVDEIDKISRKSENPSITRDVSGEGVQQALLKILEGTIAGVPPKGGRKHPQQEVINIDTSNILFICGGAFDGLKSVIQRRTETQTLGFNSVIKSKDELDNTEWMKEVTPHDLVKFGLIPELVGRLPVITALSDLDKAALVRILTEPKNCLVSQYKKLFDLDKVDLEFTPEALDAIAEKTIARKTGARGLRSIMEDTLKNLMFEVPSDYTIEKITVTKDSVENGAAPEIVHNPDRVPVKIKMTQPKRLARKDSAS

SEQ ID NO: 2803 - protein, 537 aa, unidentified
  REGION 1..537: note = Description of Unknown: uncultivated organism sequence
  REGION 1..537: note = Category: MG90 effectors
  REGION 1..537: note = Description: MG90-129 effector
MPNLLNYKYEIFPTKPQKAQLYRILRESKYQWNKAVTIRKKLKSALVSGQIEFVINTCLSAEKNNQQGQRANAIEKLRSQFPEMEFETAAHCYDVKNIIGKVLGDLPIEKLLDLKSLSEELKTRHEKEVANRKDAIAKGIDNKKLPKLTVLWQLIGAINRYAGYAAKKYMDKSFESSKGMSVSPVRSNISGSANSPRWNNAVQPSKDQRSYGATGEPNYKKRCDGFSYQIPQKKAEAVSEFFRLKRQNHGYQIFLNPLHEGNRWIDTAYHRPIPEGSKIKQMTINERAGHFFAVLSVEVPDRAWMIASMQAGWWAGIDPGASTALTIAFHNAETSETRQAAINYQFLEKSLAQLEKLQQCIAKKQGPRRKRTEDEVNKELAQFSKKQSIQKLPEQERSKIIAKKKENLEKKMIRQDASNSWKKFSRKVGEFNYRIANKRLDVLHKISRSLIEGCDVVGIGHWEPERQVSYRKERKALKKQVKAGVAGAKERLNALEEEKSKQGPKGVKKARRGGRDRAIATLRGLVDEKAKRAGTVE

SEQ ID NO: 2804 - protein, 423 aa, unidentified
  REGION 1..423: note = Description of Unknown: uncultivated organism sequence
  REGION 1..423: note = Category: MG90 effectors
  REGION 1..423: note = Description: MG90-130 effector
MAEEIKESVCSFCGKHYTDNDKTILFTADTPGALICYDCAKEIYSNYKDKIDSMREVSGSVQADQKWTPQSMKEYLDQYIIGQEKAKEILCTAVYNHYQILKMREDGNKNAVEVEKSNVIMAGPTGVGKTAIIKRLAKIMQVPCVIADSTSLTSAGYVGDDVESVIQSLLIEADYDVEKAQKGIVYLDEIDKTNRHGENPSTTADPGHEGTQQALLKLIEGTVANVPLKGQRKHPNADMVKVDTSNILFIVGGAFEGIEKIITRRHNSGMAGVGFGSVLVNDKDKKKSYNEIISDLRVEDLKKFGMTPELLGRLPVICPMKELTEEQLVEILSKPKNSLLKQYQTLFKAQGVDLTFDDEALKTVAHLAIERKTGARGLRGIMESILSHEMYSIPSDDSIGSVTVTGKDFEIIRGEKPAEEISA

SEQ ID NO: 2805 - protein, 365 aa, unidentified
  REGION 1..365: note = Description of Unknown: uncultivated organism sequence
  REGION 1..365: note = Category: MG90 effectors
  REGION 1..365: note = Description: MG90-131 effector
MYKRQIKTPAEIKEGLDQYVIGQDEAKRVLAVSVYNHYKRILSGKGADVELQKSNVLLLGPSGVGKTLLAQTLAKMLGVPFAIADATTLTEAGYVGEDVENILLKLIQAADFDVQKAQIGIIYIDEIDKITRKSENPSITRDVGGEGVQQALLKILEGTVSNVPPQGGRKHPQQEFIQIDTTNILFICGGAFDGLDKYILRRTDKSALGFGSALKDNSSEAEKALLRKVEPHDLVKFGLIPELIGRLPVITVLDDLDEDALVRVLKEPRNSLVKQYKELLSMDNVELDITDEALHAIARKTIERKTGARGLRSVMENILMPIMYDVPNDPTIIRVTIDEDTVEGGEAHMEYGAVRKRYKSQTSLS

SEQ ID NO: 2806 - protein, 508 aa, unidentified
  REGION 1..508: note = Description of Unknown: uncultivated organism sequence
  REGION 1..508: note = Category: MG90 effectors
  REGION 1..508: note = Description: MG90-132 effector
MGGGRRHTGNRNQGDPNLYAQRYGAKAPLEWTEAHARVLLLADQLWDDLRAIWIQCLHEQEMVEDATGDAELLSARGAVSRTEAQVDAAFQARRDWRQRHRSKQAPEEIEASIKAAISAAREARRELWPVLKRVRKEIREELLDLWNARDQQMRVLAQGRTRKYTDLHDGVYNDIFKRFRVAAKEGAKQGIVPRPSHEHLSQSIYRQIQPHNFGGKLVSDPKKPGKRRKRIGGSQKGAEWSTLCTTGCGKVRVLPYSPGPRVTQRWGLLVMPVDANGLEIKIPIRVDDREPPQGAQIKGVRVVRRDRKWHTVFSVDAPPPSIERGAGTLYAGLNWRLMADGSLRVLDGIDETGKRYQVCLPRWQLAAVEYAEALQAATDRRAVQAALQLEEDHPKRAKEIAEAVRRRNWAALYPLDPAWADGTHGKQGRRQHTALLRARKIAGGDLAKLTELVAEILGDRAGRRRIAGQKSKNTRRREKFSRECAQAIATRITRLQNAKGDPRTGTTR

SEQ ID NO: 2807 - protein, 354 aa, unidentified
  REGION 1..354: note = Description of Unknown: uncultivated organism sequence
  REGION 1..354: note = Category: MG90 effectors
  REGION 1..354: note = Description: MG90-133 effector
MQLATPSQIKAHLDQYVIGQDEAKRTLAVAVYNHYKRLKQNKKSDVEIQKSNILMIGSTGSGKTYLAQSLAKMLGVPFAIADATTLTEAGYVGNDCETMLRTLLQNANYDIESAQRGIIYIDEIDKISRKGENVSITRDVSGEGVQQALLKIIEGTISEVPVTGSRKHPQAETVKIDTSNILFICGGAFDGIDKIIGKEETHNSIGFGANVADKKESVTDLSKVEQHDLVKYGLMPELIGRLPIITALNPLSEEDLVHILTEPKNAITKQYQELLSMDGVKLEFEDAALRKIAELAIKKKTGARGLRSIIESAMQKVMFDVPDMAGAKKVVVTSAFVEGKADAFVYGARNKKIA

SEQ ID NO: 2808 - protein, 383 aa, unidentified
  REGION 1..383: note = Description of Unknown: uncultivated organism sequence
  REGION 1..383: note = Category: MG90 effectors
  REGION 1..383: note = Description: MG90-134 effector
MSFDELPRPSDIRKNLDDYIIGQERAKIVLSVAGYNHYKRILHGQDDGVELQKSNILLIGPTGSGKTLFAQTMAKMLDVPFAIADATTLTEAGYVGEDVENILLKLLQAADFDVERAQRGIIYIDEIDKIARKSENTSITRDVSGEGVQQALLKIVEGTVANVPPQGGRKHPHQEFIQVNTKNILFICGGAFDGLEKIIERRVEEKSIGFDAPVYSRKEQDVGKLLLQVQPHDLLKFGIIPELVGRLPVIASLNALTRDDLVQILTEPKNALVKQYQKLMEYDDVELEFEPEALTAIADKAIARNIGARGLRAIMEGMLTQIMYDIPSDPTIVKAVITKDCVEGTGKPVLTRDPDKISYSVKLNTGKSGDAKASTDADPASAS

SEQ ID NO: 2809 - protein, 394 aa, unidentified
  REGION 1..394: note = Description of Unknown: uncultivated organism sequence
  REGION 1..394: note = Category: MG90 effectors
  REGION 1..394: note = Description: MG90-135 effector
MLIEQEGKADSKKSKGKHEDEHELIKPADLKAVLDKYIVGQDEAKKTICVSVYNHYKKNFCGDDAKADEIELQKSNVLLLGPTGVGKTMIAQTLANILKVPFAIADATTLTQAGYVGEDVENVLLRLIQAADYDIEAAEHGIIYIDEIDKITRKSENTSITRDVSGEGVQQALLKIIEGTVSNVPPQGGRKHPNQEFIQINTKNILFICGGAFEGIDKLIMQRTSSSALGFGADVKSKQENKINEALHQVEPEDLVKFGIIPELVGRLPVIAVLDDLDEDALVKILSEPKNAILKQYKYMFSLDNIELEITDDAMRAIAKKAAERKTGARGLRTVVEEALSDTMFNAPSDESITKVVLTGECVTEGKKPEIIRDTNAAKLKKSADKKALKKNAG

SEQ ID NO: 2810 - protein, 728 aa, unidentified
  REGION 1..728: note = Description of Unknown: uncultivated organism sequence
  REGION 1..728: note = Category: MG91 effectors
  REGION 1..728: note = Description: MG91-1 effector
MAEEKQMRSYNIQINPDADAIKVIERDMKLMEQLYGFIIYRIESHIQQLREETEYGEYDSNYKEYCLLLAEAEQKKRQCEVFRDAKKRKNIEDPELESQYNELSAEIDKLKKHKNEWCSKCCEFFRSNRKALCHFVFESRRKVIRLKSDMVTPTENSGFILHYGVNGEPYYIYDKTYYMMVEDSIRKANKGDGYSALVCECGVVTKRVSLNEDKTFKDKVYDGVAVLTDDGEIIMPYEYLRIDNLNKNNAHGFSRLFVNEYVYSLNKNPQTKKSQKTSMTYKDYGLTSHDFDENIGNRLTLSYADFPELLSQKHRKNDFMTIMSGQQSKLMDIMCDESGGYFVRMVTHSYGRGKKKYVDIPVLISHRNKNRIGTERDMDTKVLERKLQLLETGKTNVIGISKDVIRGKSRFCVNIFLEYAGGLGLEYNENSLNQKLGLGPVGVDPGMHQIAVYSDSLKKSTIFSLETICGGIFKQKIYECYSKIDSLQKKMSRCMDENNCKAKDEKGNFIKGKKLFKSKRYMAMQKEVSELYRRIAELKETANIFIAHKLLSYGNVFYIEDPRSAEKKRRMQGVVYDANGRVVKNRKFGRSIQKFSISGMIYKILDVIESRGGKIYWINNESAATAYVPKRDNVSHGMGERVFNWLGHKVQRDMKSGYVLSACKELEEMKGKKKYLNKPIYKVVSYDDERLLNDVDVFAESVREEMERCRDLNVEDKTIGIEKYFNKN

SEQ ID NO: 2811 - protein, 510 aa, unidentified
  REGION 1..510: note = Description of Unknown: uncultivated organism sequence
  REGION 1..510: note = Category: MG91 effectors
  REGION 1..510: note = Description: MG91-2 effector
MFVVELPLKVEKWQSDVLNKRYELLAKIYNYAQTKLLRQYIYLTQMDEYKKCKTKQDKSVFFKNHPFYFKGITSKITFSEYDVTNFVNKIIKKNVSSDKTYKDFGINTSITEYLGKHAWSAWKKKIYGNGKKVSFKNKDELNTISIRKKSEYFGGLDVDIEHMILSFNINGRTKTKAKKIILPINVKNLTEYEMYALKDGYDSINVVTIMRKMIRGNYKYYVQFTIEGEKPQKGRTLGKGNVGIDIGPSTVAISSLNGVTIDTLAEKCDNIEDKISDIERKMDRSRRATNPQNFTEDGQIKRIDRKKGEKREWKYSKRYVKLHNKKRELLRKQAAIRKLRHNIKANEILSLGDTFIVENNPTSAWAKRAKGVRKNKNGKIQTNKRFGKSIGNHAPAMFVTILQNKVESLKGKFVKVDPKNAASRFDFTNSDFTEHNLDERKITLSNGNTHQRDMLAAFNLQHIDLTNDDLKKYNVNEMIEDYPIFCKLEKEEIKRFINGIKISNKSNIGI

SEQ ID NO: 2812 - protein, 542 aa, unidentified
  REGION 1..542: note = Description of Unknown: uncultivated organism sequence
  REGION 1..542: note = Category: MG91 effectors
  REGION 1..542: note = Description: MG91-3 effector
MKKEKNNKGNYVITFPLITEPWQEDLLNKFFKHCCDIQNKLIKITLPVFNKHKDEIFKNEERILELCAKKKKSNLNEEETNELSALYEEKKNTLSVIKTDEIKGLVSYPKTIELFSEFGLGATCTKLIKDNIGGTDKKHENLKYNSTFPQIASPIAENIGKRVYCAYEKYIWGNGKIVHYKKNCNFNTVSFCVKKGCTFATVDVIKHNLLFKSSIGIHNGKTMTIPFKVKFDKCDEQQTLSEGQKYEMNALNNQEIKIIGIKRTFVRGKFKFELQLTFEGKPYSKNRTLGNGDVGVDPGVSSLTLYGKTVRQFRAPDNVKKTEQKINELQRYIKHTDKLLNPNKFNENGTLKKGDKAKWKHSNNNLKARKRKKELERQLKEKTKLSQIEFANSVLSEGNVLKIEDNDISNWNKNLKGIRKDKNGKILSNKKYGKSIKRTAPAQGLTILKRKYKSLGGTVIDINEKARATGTDHTNGIYTYRPVSQRKVTLSNGNTHHRDAHAAFNLKHYNNNTKHYDFKKMSEDYQHFCQEESNAFKRNELK

SEQ ID NO: 2813 - protein, 532 aa, unidentified
  REGION 1..532: note = Description of Unknown: uncultivated organism sequence
  REGION 1..532: note = Category: MG91 effectors
  REGION 1..532: note = Description: MG91-4 effector
MPVTSQSFVIELPIAVDDAEMRTIVRKLEFARQLHNATLGTAMGQLQQMRQDAAWKEACVMPKGKERAAAFRALDRKYGLTEYDLHSVIARHREGSGRKAELGINETQKIATRVFQAINRYKLGLGGMPRFKSSKRGLHSIEGKTNKTGLKFRPEKKVLNWCGHDYRVLIDPKDDYIQRALKENERSDKYRKIKYCRLVRKRIRSSDRFFLQVVLEGTAPVKHVYAPVTERAAIDPGPQSIALFSKAFAGKIQVAGSNNFNEAASRRLLRAMDRSLRRNNPDAYNENGTIKKGAKLVKSKNYQRKVDRLREMHRVAAAERKCRHGQTINLLLSIAGDIRIEKNIWKAFQRGHFGKSLGKSAMSGFIAQLKSKAASAGLKVTEVNPYKLKLSQYDPYTDTYRKKDLSERWQEMKAGSGQYIQRDVLSALLLYCADIEKEIHIPKVAVEQLEGAKQFLTDAGYVVLKSTSSRDQRDPRLASEPKAMTPEMARQKILRGAGDSHLPTDQELGQIRAGGKVSTWSKETFPLQRGVV

SEQ ID NO: 2814 - protein, 484 aa, unidentified
  REGION 1..484: note = Description of Unknown: uncultivated organism sequence
  REGION 1..484: note = Category: MG91 effectors
  REGION 1..484: note = Description: MG91-5 effector
MAHKENQKAFVVTFPLRTEKWQEDRIDKMMRMLTTFYNDRQRKLVRRYIYLSHSKAYKESKGKGVVAFKNYMKEHGFSQYGLDAFFKADTKGALYQCGLNSMFLQYLSQCAWSAWDKKLFGKGDFVKTDKVVNIFCSRNKKERFCGFDYDLRTFTISIKSTCTKKIICSIPFVVNKNSEYELYALSQKICRIGIVRKLIRSKYKYYVQFTFDGVPYNKGRNIGTGIVGIDPGPSKIAIVGDNKVEIAKLAPNIEEDERKTARLKRKLDRSRRATNPHMYKEDGTIIKGQRQTCFSKAYNETRKQLADAQRKLTAKRKIAHNELANTLLEYGDTFKVEANSYKSMQARAKATSMTKSGRIRSKKRYGKSIKNRAPSEFLVILKNKLLHYPNGKYYAVPASYACTQFDFTNESFTEHKISERKIVTSDGIQHNRDTLAAFNIKNAIVNDTSTKKKKVTKSKEFFDIVKMKASYNEYCVMERYLLSV

SEQ ID NO: 2815 - protein, 490 aa, unidentified
  REGION 1..490: note = Description of Unknown: uncultivated organism sequence
  REGION 1..490: note = Category: MG91 effectors
  REGION 1..490: note = Description: MG91-6 effector
MAHKENQKAFVVTFPLRTEKWQEDRIDKIMRMLTTFYNDRQRKLVRRYIYLSHSKAYKEAKSKGVVAFKNYMKENGFSLYGLDAFFKADTKGALYQCGLNSMFLQYLSQCAWSAWDKKLFGNGDFVKTTKVVNIFCSRNLKGKFCGFDYDLSTFTIRIKSTCTKKIICTIPFVVNEKSYYELFALSQKICRIGIVRKLIRSKYKYYVQFTFDGIPYNKGRNIGTGIVGIDPGPSKIAIVGDNKVEILKLAPNIEEDERKTARLKRKLDRSRRATNPHMYKEDGTIIKGQRQTCFSKAYNETRKQLADAQRKLAAKRKIAHNELANTLLEYGDTFKVEANSYKSMQARAKATSVTKSGRIRSKKRYGKSIKNRAPSEFLVILKNKLLYYPKGKYYDVPASYACTQFDFTNESFTEHKISERKIVTSDGIQHNRDTLAAFNIKNSIVNDTSTKKKKITKSKEFFDIKKMKASYNEFCIMEHTSFQYKEIMEL

SEQ ID NO: 2816 - protein, 524 aa, unidentified
  REGION 1..524: note = Description of Unknown: uncultivated organism sequence
  REGION 1..524: note = Category: MG91 effectors
  REGION 1..524: note = Description: MG91-7 effector
MNEVFVLELPLQVEKYQADILNKRYEQLRQLYNYVQGKLLRQYRYFEQMKEYQACKTIKEKNDFFKSHPFQVNESLGGDKSAFEISFNEFSIKGFIEKLVQKSAGANMTYADLGFTTNILDHLGASVWAAWDKKLYDFKAKRISFKKYGELDSFSCRRKVVGGKVYFSGMELHLDTMELAIKMNGKQGKNAKFITLKMLYNPKHADYEMWALKGGVDSVKVVKVVRRLVRSQYKYYVQLTIEGEKPQKGRMLGKGNVGIDLGPTTVAVSGENVVSIDKLASKCDNIQEEITRLSRKIDRSRRANNSQNFNEDGTIKRGIKLVWNDSKRYKELRRELAELRRKQAAIRKQQHIDRANALLKEGDTFIVENNQISGWTTRAKETKVNEKTGKIQKKKRFGKSVANHAPSMFVSILENKVKSLGGEVVKVDTKNAASQYDFTDGSFTKHELKERNVTLSNGDTHQRDMLAAFNLQHLKYDEAEAKQYDTGAMAADYERFCQLEQEEIQRYKNKEKKDNRGTIGAEKL

SEQ ID NO: 2817 - protein, 483 aa, unidentified
  REGION 1..483: note = Description of Unknown: uncultivated organism sequence
  REGION 1..483: note = Category: MG91 effectors
  REGION 1..483: note = Description: MG91-8 effector
MAHKENQKAFVVTFPLRTEKWQEDRIDKMMRMLTTFYNDRQRKLVRRYIYLSHSKAYKEAKGKGVVAFKNYMKEHGFSQYGLDAFFKADTKGALYQCGLNSMFLQYLSQCAWSAWDKKLFGKGDFVKTDKVVNIFCSRNMKGRFCGFDYDLSTFTISIKSTCTKKIICTIPFVVNKKSDYELFALSQKTCRIGIVRKLIRSKSKYYVQFTFDGVPYNKGRNIGTGIVGIDPGPSKIAIVGDKKVELRKLAPNIIEDERKTARLKRKLDRSRRATNPHMYKEDGTNIKGQRQICFSKAYNETRKQLAEAQRKLAAKRKIAHNKLANTLLEYGDTFKVEANSYKSMQARAKTTSMTKSGRIRSKKRYGKSIKNRAPSEFLVILKNKLLRYPKGKYYDVPASYACTQFDFTNESFTQHKISERKIVTSDGIQHNRDTLAAFNIKNAIVNDTSKKKKITKSKEFFDIVRMKASYNEFCLMERYLLSV

SEQ ID NO: 2818 - protein, 521 aa, unidentified
  REGION 1..521: note = Description of Unknown: uncultivated organism sequence
  REGION 1..521: note = Category: MG91 effectors
  REGION 1..521: note = Description: MG91-9 effector
MAKEVFVIEFPLKVEKWQSDILNKRYEHLRQLYNYVQGKLLRQYIYFTQMGEYKACKSLKEKKDFFKEHIFHFKGIVGRNKKPLDISFTQYGISGLVSKLGQFSIGGKTYNDIGIGSTILANLAANVWASWDKRLYDIECERISFKKYGELNTFGSGKINKKYFCGFDLHLDRMKLDIKINGRTGKQAKFISLPIRYNLKHVDYEMNALAGGFDSIKVLTVVRRMVRGQYKYYLQMTIEGVKPQKGRHLGKGRVGIDIGPTTIAVSSNSTVSIDKLAAKCDNIEKDIQRINRKLDRSRRTMNPDNFNENGTIKRGVHLIWNNSENYKALRRQKAELQRKQAAVRKMQHIERANSLISEGDTFIIESNPIKGWTARAKETKISEKTGRIQKKKRWGKSVANHAPSMFITILENKVKSLGGTVIKADVKNAASQYDFTDGTFTKHELDERGVTLSNGDTHQRDMLSAFNLQHLIYDAKELKQYDQQRMKSHYPRFCELEQDEIERYRNKVKKDDRCTIAASRL

SEQ ID NO: 2819 - protein, 528 aa, unidentified
  REGION 1..528: note = Description of Unknown: uncultivated organism sequence
  REGION 1..528: note = Category: MG91 effectors
  REGION 1..528: note = Description: MG91-10 effector
MNEVFVLELPLQVEKYQADILNKRYEQLRQLYNYVQGKLLRQYRYFEQMKEYQACKTFKEKRDFFRSHPFHIDGILGSNKELFDITFDEYGINGFVGKLGKKQVSAGVTYADLGITSTLLDRLSLAVWAAWEKMLYDYHARRVSFKKYGELNIFGSRKKTNGSGKKMFSGMELHLEKMEVAIKLNGKVGKAAKFITLPILHNPKHVDYEMWALKGGFDSVTVLTIVRRLVRSQYKYYVQLTIEGEKPQKGRTLGKGNVGIDLGPTTVAVCGENVVSIDKLASKCDNIQEKITRLSRKIDRSRRANNPQNFNEDGTIKRGIKLVWKKDKDLKRYSKLKRELAELRRKQAAIRKQQHINRANALLKEGDTFIVENNQISSWTTRAKETKVNEKTGRIQKKKRFGKSVANHAPSMFINILENKVKSLGGKVVKVDTKNAASQYDFTDGSFTKHELKERNVTLSNGDMHQRDILAAFNLQHLKYDEAEAKQYDTEAMSADYERFCQLEQEEIQRYKNKEKKDDRGTIGAEKL

SEQ ID NO: 2820 - protein, 530 aa, unidentified
  REGION 1..530: note = Description of Unknown: uncultivated organism sequence
  REGION 1..530: note = Category: MG91 effectors
  REGION 1..530: note = Description: MG91-11 effector
MTSQSFVIELPIAVDDAEMRTIVRKLEFARQLHNATLGTAMGQLQQMRQDAAWKEACVMPKGKERAAAFRALDRKYGLTEYDLHSVIARHREGSGRKAELGINETQKIATRVFQAINRYKLGLGGMPRFKSSKRGLHSIEGKTNKTGLKFRPEKKVLNWCGHDYRVLIDPKDDYIQRALKENERSDKYRKIKYCRLVRKRIRSSDRFFLQVVLEGTAPVKHVYAPVTERAAIDPGPQSIALFSKAFAGKIQVAGSNNFNEAASRRLLRAMDRSLRRNNPDAYNENGTIKKGAKLVKSKNYQRKVDRLREMHRVAAAERKCRHGQTINLLLSIAGDIRIEKNSWKAFQRGHFGKSLGKSAMSGFITQLKSKAASAGLKVTEVNPYKLRLSQYDPYTDTYRKKDLSERWQEMKAGSGQYIQRDVLSALLLYCANIEKEIHIPKVAVEQLEGAKQFLTDAGYVVLKSTSSRDQRDPRLASEPKAMTPEMARQKILRGAGDSHLPTDQELGQIRAGGKVSTWSKETFPLQRGVV

SEQ ID NO: 2821 - protein, 530 aa, unidentified
  REGION 1..530: note = Description of Unknown: uncultivated organism sequence
  REGION 1..530: note = Category: MG91 effectors
  REGION 1..530: note = Description: MG91-12 effector
MTFQSFVIELPIAVDDAEMRTIVRKLEFARQLHNATLGTAIGQLQQMRQDTAWKQACAMPKGKERTAAFRALDRKYGLTEYDLHSVIARHREGSGRKAELGINETQKIATRVFQAINRYKLGLGGMPRFKSSKRGLHSIEGKTNKTGLKFRPEKKVLNWCGHDYRVLIDPKDDYIQRALKENERSDKYRKIKYCRLVRKRIRSSDRFFLQVVLEGTAPVKHVYAPVTERAAIDPGPQSIALFSKEFAGKIQVAGSNNFNEAVSRRLLRAMDRSLRRNNPDAYNEDGTIKKGAKLVKSKNYQRKVDRLREMHRVAAAERKCRHGQTINLLLSIAGDIRIEKNSWKAFQRGHFGKSLGKSAMSGFIAQLKSKAASAGLKVTEVNPYKLKLSQYDPYTDTYRKKDLSERWQEMKAGSGLYIQRDILSALLLYCADIEKEIHIPKVAVEQLEGTKQFLTDAGYVVLKSTSSRDQRDPRLASEPKAMTPEMARQKIFRGAGDSHLPTDQELGQIRAGGKVSTWSKETFPLQRGVV

SEQ ID NO: 2822 - protein, 484 aa, unidentified
  REGION 1..484: note = Description of Unknown: uncultivated organism sequence
  REGION 1..484: note = Category: MG91 effectors
  REGION 1..484: note = Description: MG91-13 effector
MAHKENQKAFVVTFPLRTEKWQEDRIDKIMRMLTTFYNDRQRKLVRRYIYLSHSKAYKEAKSKGVVAFKNYMKENGFSLYGLDAFFKADTKGALYQCGLNSMFLQYLSQCAWSAWDKKLFGNGDFVKTTKVVNIFCSRNLKGKFCGFDYDLSTFTIRIKSTCTKKIICTIPFVVNEKSYYELFALSQKICRIGIVRKLIRSKYKYYVQFTFDGIPYNKGRNIGTGIVGIDPGPSKIAIVGDNKVEILKLAPNIEEDERKTARLKRKLDRSRRATNPHMYKEDGTIIKGQRQTCFSKAYNETRKQLADAQRKLAAKRKIAHNELANTLLEYGDTFKVEANSYKSMQARAKATSVTKSGRIRSKKRYGKSIKNRAPSEFLVILKNKLLYYPKGKYYDVPASYACTQFDFTNESFTEHKISERKIVTSDGIQHNRDTLAAFNIKNSIVNDTSTKKKKITKSKEFFDIKKMKASYNEFCIMEHHLLSV

SEQ ID NO: 2823 - protein, 484 aa, unidentified
  REGION 1..484: note = Description of Unknown: uncultivated organism sequence
  REGION 1..484: note = Category: MG91 effectors
  REGION 1..484: note = Description: MG91-14 effector
MAHKENQKAFVVTFPLRTEKWQEDRIGKMMRMLTTFYNDRQRKLVRRYIYLSHSKAYKEAKGKGVVAFKNYMKENGFSQYGLDAFFKADTKGALYQCGLNSMFLQYLSQCAWSAWDKKLFGKGDFVKTDKVVNIFCSRNMKGRFCGFDYDLSTFTIRIKSTCTKKIICTIPFVVNKNSEYELYALSQKICRIGIVRKLIRSKYKYYVQFTFDGVPYNKGRNIGTGIVGIDPGPSKIAIVGDKKVEIAKLAPNIIEDERKTARLKRKLDRSRRATNPHMYKEDGTNIKGQRQICFSKSYNETRKQLADAQRKLAAKRKIAHNELANTLLEYGDTFKVEANSYKSMQARTKATSMTKSGRIRSKKRYGKSIKNRAPSEFLVILKNKLLHYPNGKYYAVPASYACTQFDFTNESFTEHKISERKIVTSDGIQHNRDTLAAFNIKNAIVNDSSAKKKKITKSKEFFDIVRMKASYNEFCLMERYLLSV

SEQ ID NO: 2824 - protein, 511 aa, unidentified
  REGION 1..511: note = Description of Unknown: uncultivated organism sequence
  REGION 1..511: note = Category: MG91 effectors
  REGION 1..511: note = Description: MG91-15 effector
MEKEFFVIELPLKIEKWEADLINKRYELLRSIYNYAQNKLLRQFKYFEQMTEWKNCKTKKNKSDFFKKHPFYFKGISSKITFSEYDITAFVEKLIKKQVSSNKTYKDFGINSSIAESIGKHIWSAWEKKIYNKGEKISFKKKGKLNSISVRKKSGYFGGIDVDLENMLLRLNINGKIGKKSNKITLPIVFDKPTEYEMYSFKNGIDSINVVTIVRKLIRGNYKYYVQFTIEGKKPQKGRVLGKGKVGVDVGPSTVAVSSINGVQIITLAEKCDGIEHKCKLLERKMDRSRRATNPQNYNDNGTIKKIKNEHLKWVYSKRYSKIRNKKCELQRKQAAIRKLQHNINTNELLKFGDSFIVENNPISAWQHKAKETKINKNGKIQSKKRFGKSIANHAPAMFITILENKVKSLGGELIKVDIKNAASRFDFTNSDFVEHKLNERKITLSNGNTHQRDLLAAFNLQHLNSDDESLKSYNIEEMKKDYPIFCKLEETEIDKFVNGQKKSHKYTVGY

SEQ ID NO: 2825 - protein, 530 aa, unidentified
  REGION 1..530: note = Description of Unknown: uncultivated organism sequence
  REGION 1..530: note = Category: MG91 effectors
  REGION 1..530: note = Description: MG91-16 effector
MTSQSFVIELPIAVDDAEMRTIVRKLEFARQLHNATLGTAMGQLQQMRQDAAWKEACVMPKGKERAAAFRALDRKYGLTEYDLHSVIARHREGSGRKAEQGINETQKIATRVFQAINRYKLGLGGMPRFKSSKRGLHSIEGKTNKTGLKFRPEKKVLNWCGHDYRVLIDPKDDYIQRALKENERSDKYRKIKYCRLVRKRIRSSDRFFLQVVLEGTAPVKHVYAPVTERAAIDPGPQSIALFSKAFAGKIQVAGSNNFNEAASRCLLRAMDRSLRRNNPDAYNENGTIKKGAKLVKSKNYQRKVDRLREMHRVAAAERKCRHGQTINLLLSIAGDIRIEKNSWKAFQRGHFGKSLGKSAMSGFIAQLKSKAASAGLKVTEVNPYKLRLSQYDPYTDTYRKKDLSERWQEMKAGSGLYIQRDVLSALLLYCADIEKEIHIPKVAVEQLEGAKQFLTDAGYVVLKSTSSRDQRDPRLASEPKAMTPEMARQKIFRGAGDSHLPTDQELGQIRAGGKVSTWSKETFPLQRGVV

SEQ ID NO: 2826 - protein, 484 aa, unidentified
  REGION 1..484: note = Description of Unknown: uncultivated organism sequence
  REGION 1..484: note = Category: MG91 effectors
  REGION 1..484: note = Description: MG91-17 effector
MAHKENQKAFVVTFPLRTEKWQEDRIDKIMRMLTTFYNDRQRKLVRRYIYLSHSKAYKEAKGKSVVAFKNYMKENGFSQYGLDAFFKADTKGALYQCGLNSMFLQYLSQCAWSAWDKKLFGNGDFVKTTKVVNIFCSRNQKGKFCGFDYDLSTFTIRIKSTCTKKIICTIPFIVNKKSDYELFALSQKICRIGIVRKLIRSKYKYYVQFTFDGIPYNKGRNIGTGIVGIDPGPSKIAIVGDNKVEILKLAPNIEEDERKTARLKRKLDRSRRATNPHMYKEDGTTIKGQRQTCFSKAYNETRKQLADAQRKLAAKRKIAHNELANTLLEYGDTFKVEANSYKSMQARTKATSVTKSGRIRSKKRYGKSIKNRAPSEFLVILKNKLLYYPKGKYYDVPASYACTQFDFTNESFTEHKISERKIVTSDGIQHNRDTLAAFNIKNSIVNDTSTKKKKITKSKEFFDIKKMKASYNEFCIMEHHLLSV

SEQ ID NO: 2827 - protein, 525 aa, unidentified
  REGION 1..525: note = Description of Unknown: uncultivated organism sequence
  REGION 1..525: note = Category: MG91 effectors
  REGION 1..525: note = Description: MG91-18 effector
MNEVFVLELSLQVEKYQADILNKRYEQLRQLYNYVQGKLLRQYRYFEQMKEYQACKTFKEKRDFFRSHPFHIDGILGSNKEPFDITFDEYGINGFVGKLGKKQVSTGVTYADLGITSTLLDRLSLAVWAAWDKMLYDYHAHRVSFKKYGELNIFGSRKKTNGSGKKVFSGMELHLEKMEVAIKLNGKVGKAAKFITLPILHNPKHADYEMWALKGGFDSVTVLTIVRRLVRSQYKYYVQLTIEGEKPQKGRTLGKGNVGIDLGPTTVAVSGENVVSIDKLASKCDNIQEEITRLSRKIDRSRRANNPQNFNEDGTIKRGIKLVWNDSKRYKELRRELAELRRKQAAIRKQQHIDRANALLKEGDRFIVENNQISGWTTRAKETKVNERTGKIQKKKRFGKSVANHAPSMFVSILENKVKSLGGEVVKVDTKNAASQYDFTDGSFTKHELKERNVTLSNGDTHQRDMLAAFNLQHLKYDEAEAKQYDTEAMAADYERFCQLEQEEIQRYKNKEKKDDRGTIGAGDL

SEQ ID NO: 2828 - protein, 494 aa, unidentified
  REGION 1..494: note = Description of Unknown: uncultivated organism sequence
  REGION 1..494: note = Category: MG91 effectors
  REGION 1..494: note = Description: MG91-19 effector
MARENEDSGCFVVTFPLKTEKWQEDRIDKILNLLTVRYREKQKTLLDRYIHLSHSPEFKEAKNAGLKAFRDFMNEHKFTKFDIQKVFSDSSLSKSATTDVMLTHGINSDIMEELSHRAWSAWEKKLYGQGKFIRLDNEVNIFKSRRHKEHITGFEYSFTDMTLSMNATKPKKHTMFTIPFVVNRKREYEAYALGCEVRNIAIVRQQIRGKNKYYVQFSFAGTPYNKGRKIGTGIVGIDPGPSKIAIVSDSEIRITTLAPSVKRDERAVCRMQRKLDRSRRATNPDNYNDDGTIKRGIKLKFEKSNSYKRTQAKLADMQRKLAAKRKIDHNILANEIITMGNEFHVENNSFKSMQARSKETKKNDKGKNLSKKRFGKSLANRAPSELLTILKNKVCQYADGEYVDIPSGVSCTQFDFTNGEFTKHELKERIITTSDGFVHDRDALAAFNMRFVNRQRIEGKKKVEKDKENFDLQAMTKAYKQFCALEENIKNRDK

SEQ ID NO: 2829 - protein, 375 aa, unidentified
  REGION 1..375: note = Description of Unknown: uncultivated organism sequence
  REGION 1..375: note = Category: MG91 effectors
  REGION 1..375: note = Description: MG91-20 effector
MLNWCGHDYRVLIDPKDDYIQRALKENERSDKYRKIKYCRLVRKRIRSSDRFFLQVVLEGTAPVKHVYAPVTERAAIDPGPQSIALFSKEFAGKIQVAGSNNFNEAVSRRLLRAMDRSLRRNNPDAYNEDGTIKKGAKLVKSKNYQRKVDRLREMHRVAAAERKCRHGQTINLLLSIAGDIRIEKNSWKAFQRGHFGKSLGKSAMSGFIAQLKSKAASAGLKVTEVNPYKLRLSQYDPYTDTYRKKDLSERWQEMKAGSGLYIQRDVLSALLLYCADIEKEIHIPKVAVEQLEGAKQFLTDAGYVVLKSTSSRDQRDPRLASEPKAMTPEMARQKIFRGAGDSHLPTDQELGQIRAGGKVSTWSKETFPLQRGVV

SEQ ID NO: 2830 - protein, 528 aa, unidentified
  REGION 1..528: note = Description of Unknown: uncultivated organism sequence
  REGION 1..528: note = Category: MG91 effectors
  REGION 1..528: note = Description: MG91-21 effector
MNEVYVLELPLRVEKYQADILNKRYEQLRQLYNYVQGKLLRQYRYFEQMREFQDCKTFKAKREFIKSHPFHVNGVIGRNKELLDIFFDEYGIQGFVAKLGQKPIGSGMNYTDMGISSTILANLSANIWSAWNKKLYDYRAERIAFKRYGGLNTFGSGKIVQKKDGEVKEYFPGMVLRLESMELDIKTNGKLGKNAKFITLPILHNPKHADYEMWALKGGMRSVKVLTVVRRMVRNQYKYYLQMSIEGEKPQKGRTLGKGNVGIDLGPTTVAVSGENIVSIDKLASKCDNIQKEITRLARKIDRSRRANNPQNFNEDGTVKRGIKLVWNDSNRYKELRREMAELQRRQAAIRKQQHIDRANELLKEGDTFIVENNQISGWTRKAKETKVNEKTGKIQKKKRFGKSVANHAPAMFVTILENKVKSLGGEVVKVDTQNAASQYDFTNDSFEKHELKERSVTLSNGDTHQRDMLAAFNLQHLKYDDKEKKQYDTEAMKEHYERFCEMEQEEITRYKNKEKKDDRTTIGASDL

SEQ ID NO: 2831 - protein, 383 aa, unidentified
  REGION 1..383: note = Description of Unknown: uncultivated organism sequence
  REGION 1..383: note = Category: MG91 effectors
  REGION 1..383: note = Description: MG91-22 effector
MFLQYLSQCAWSAWDKKLFGKGDFVKTDKVVNIFCSRNMKGRFCGFDYDLSTFTIRIKTTCTKKIICTIPFVVNKNSEYELYALSQKICRIGIVRKLIRSKYKYYVQFTFDGVPYNKGRNIGTGIVGIDPGPSKIAIVSDEKVEIAKLAPGIEEDERKTARLRRKLDRSRRATNPHMYKEDGTIIKGQRQTYFSKVYNETRKQLADAQRKLAAKRKIAHNELANTLLEYGDTFKVEANSYKSMQARTKATSMTKSGRIRSKKRYGKSINNRAPSEFLVILKNKLLYYPKGKYYDVPSSYACTQFDFTNESFTEHKISERRIVTSDGIQHNRDTLAAFNIKNAIVNDTSTKKKKITKSKEFFDIVKMKASYNEFCVKERYLLSV

SEQ ID NO: 2832 - protein, 543 aa, unidentified
  REGION 1..543: note = Description of Unknown: uncultivated organism sequence
  REGION 1..543: note = Category: MG91 effectors
  REGION 1..543: note = Description: MG91-23 effector
MEKEMFVIEFPLKVEKWQADILDKRYEHLRKIYNYAQGKLVRQYDYLTQMKEYRRHGFSKEYEGMLVERGYEKALRAIKAAKDQFFRNHPFHVSGVSDSSGKPMNITFSSFGIPGFIEKLASHRIGADTTYGDLGINSIILGLLGKQLWSAWDRMINDPNTEKVSFKKYGELNSFATRVKGKEGKKVSSGMNLYLDTMTLDIKVNGKTGRNAKFISLPIVYNLKHADYEMNALHGGLESIKVIKVLRRLVRGKYKYYLQLTIGDEKPQKGRQLGKGRVNIDLGLTKIAVYSDAGVMVRPLAPSTEKIDHQILLVQRKMDRSRRANNPGYFNADGTIKELEKGERRRWMNSEEYKRLRMQKAELQRRQAAVRKQDHISLANELLKLGNLFVIEDNDVKEWQQRKKEAIRREEDGKNLSQAGFGKHVANHAPAMFVTILENKVKSLGGTLVKVDTNNGATEYDFTNDTFTKHDLTERYITLSDGKRHQRDTLAAFNLGFLNLDPQKKRSYNRENMRGHYDRFCQMEEIALKSYRSQSAVGAVNNL

SEQ ID NO: 2833 - protein, 484 aa, unidentified
  REGION 1..484: note = Description of Unknown: uncultivated organism sequence
  REGION 1..484: note = Category: MG91 effectors
  REGION 1..484: note = Description: MG91-24 effector
MAHKENQKAFVVTFPLRTEKWQEDRIDKMMRMLTTFYNDRQRKLVRRYIYLSHSKAYKEAKGKGVVAFKNYMKENGFSQYGLDAFFKADTKGALYQCGLNSMFLQYLSQCAWSAWDKKLFGKGDFVKTDKVVNIFCSRNKKERFCGFDYDLSTFTISIKSTCTKKIICTIPFVVNKKSDYELFALSQRICRIGIVRKLIRGKYKYYVQFTFDGVPYHKGRNIGTGIVGIDSGPSKIAIVGDNKVEIAKLAPNIEEDERKTARLKRKLDRSRRATNPHMYKEDGTIIKGHCQTCFSKVYNETRKQLADAQRKLAAKRKIAHNELANTLLEYGDTFKVEANSYKSMQARTKATSMTKSGRIRSKKRYGKSIKNRAPSEFLVILKNKLLHYPNGKYYAVPASYACTQFDFTNESFTEHKISERKIVTSDGVQHNRDTLAAFNIKNAIVNETSTKKKKITKSNEFFDIVRMKASYNEFCLMERYLLSI

SEQ ID NO: 2834 - protein, 607 aa, unidentified
  REGION 1..607: note = Description of Unknown: uncultivated organism sequence
  REGION 1..607: note = Category: MG91 effectors
  REGION 1..607: note = Description: MG91-25 effector
MAKEEFVLTLPLKVEKWQADILDKRYELLRQVYNMVQQKLVRQYIYFSQQKAYRDCKSFEQKREFFENHPFHIKGVKGRNGELCDVKFPYTYRSRGGPSGKRAPNGISDFVSKLGSRKIGEDKTLADFGINSIILEELGLHIMRAWETRLYKPKSSRVSYREYGDINSFGSRKINTNFTGFTINIEDRYIAFNTNGRRGQFADFIQLPIDFSREKNGYAREALNGGIESLKKLLIVRKCIRGGNKYYLQLTISGEKPQKGRTLGKGNVGIDIGPSTIATSSLKGVHFDKLADKCDNIEHELYLINRKLDRSRRANNPQNYNEDGTIKRGIRLVWKKDKDAKRYATLKQQRKELYRKQAEIRKQQHLEMANAMLSQGDTFIVENNPIDAWVRRAKETTKTKTGKNRCKKRYGKSVANHAPSMLVSILKNKVLSLGGNFYEIDPRNAATQFDFTNGEFTKHEVSERSITLSNGCSHQRDMLSAFNLQHIVLQSKELKEYDIEQMEADYPIFCRLESAEQERFKDARHKERDALYYVGASKKQMRRNPQEKSVANRHNGGVGRKHCNTSLGNENAEITGSGLARESIERVSQVPDEYHPFGCDPIVLDGL

SEQ ID NO: 2835 - protein, 521 aa, unidentified
  REGION 1..521: note = Description of Unknown: uncultivated organism sequence
  REGION 1..521: note = Category: MG91 effectors
  REGION 1..521: note = Description: MG91-26 effector
MAKEVFVIEFPLKVEKWQADILNKRYEHLRRLYNYVQSKLLRQYIYFTQMQDYKKCKTLKEKKNFFKEHVFHIKGILGRNKSPLDITFTEYGILGMVTKLSQLSMGGKSYSDIGIGFTILANLADNIWAAWNKRLYDFECERISFKKYGSLDTFGSGKINNKYFCGFDLHLDRMTLDIKINGRTGKQAKFISLPIRYNMKHVDYEMNALAGGFDSIKVLTVVRRMVRGQYKYYLQMTIEGVKPQKGRHLGKGRVGIDIGPTTIAVSSNSTVSIDKLAAKCDNIEKDIQRINRKLDRSRRTMNPDNFNEDGTIKRGVRLIWNNSENYKALRRQKAELQRKQAAVRKMQHIERANSLLSEGDTFIVENNPIKGWAAKAKETKVSEKTGKIQKKKRWGKSVANHSPAMFVTILENKVKSMGGTVIKADVKNAASRYDFTDGSFTKHDLDERGVTLSNGDTHQRDMLAAFNLQHLIYDAEKPKQYDQLRMKSHYPRFCELEQDEIERYRNKVKKDDRCTIAASRL

SEQ ID NO: 2836 - protein, 530 aa, unidentified
  REGION 1..530: note = Description of Unknown: uncultivated organism sequence
  REGION 1..530: note = Category: MG91 effectors
  REGION 1..530: note = Description: MG91-27 effector
MTSQSFVIELPIAVDDAEMRTIVRKLEFARQLHNATLGTAIGQLQQMRQDTAWKQACAMPKGKERTAAFRALDRKYGLTEYDLHSVIARHREGSGRKAELGINETQKIATRVFQAINRYKLGLGGMPRFKSSKRGLHSIEGKTNKTGLKFRPEKKVLNWCGHDYRVLIDPKDDYIQRALKENERSDKYRKIKYCRLVRKRIRSSDRFFLQVVLEGTAPVKHVYAPVTERAAIDPGPQSIALFSKEFAGKIQVAGSNNFNEAVSRRLLRAMDRSLRRNNPDAYNEDGTIKKGAKLVKSKNYQRKVDRLREMHREAAAERKCRHGQTINLLLSIAGDIRIEKNSWKAFQRGHFGKSLGKSAMSGFIAQLKSKAESAGLKVTEVNPYKLKLSQYDPYTDTYRKKDLSERWQEMKAGSGQYIQRDVLSALLLYCANIEKEIHIPKVAVEQLEGAKQFLTDAGYVVLKSTSSRDQRDPRLASEPKAMTPEMARQKILRGAGDSHLPTDQELGQIRAGGKVSTWSKETFPLQRGVV

SEQ ID NO: 2837 - protein, 526 aa, unidentified
  REGION 1..526: note = Description of Unknown: uncultivated organism sequence
  REGION 1..526: note = Category: MG91 effectors
  REGION 1..526: note = Description: MG91-28 effector
MNEVFVLELPLQVEKYQADILNKRYEQLRQLYNYVQGKLLRQYRYFEQMKEYQACEKIKEKRDFFRSRPFQINETLKGIETPVKLSFEEYSIKGYIEKLVQKSVGANMTYADLGFTTNILDYLGAGVWAAWDKKLYDFKAKRVSFKKYGELDSFSSRRKVVRGVVYFSGMELHLDTMELAIKMNGKVGKESRFITLKMLHNPKHADYEMWALKGGVESVKVVKVVRRLVRSQYKYYVQLTIEGEKPQKGRTLGKGNVGIDLGPTTVAVSGENVVSIDKLASKCDNIQEEITRLSRKIDRSRRANNPQNFNEDGTIKRGIKLVWNDSKRYKELRRELAELRRKQAAIRKQQHIERANALLKEGDTFIVENNKISSWTTRAKETKVNEKTGKIQKKKRFGKSVANHAPSMFVSILENKVKSLGGEVVKVDTKNAASQYDFTDGSFTKHELKERNVTLSNGDIHQRDMLAAFNLQHLKYEEAEAKQYDTKAMADDYERFCQLEQEEIQRYKTKEKKDDRGTIGAEKLIK

SEQ ID NO: 2838 - protein, 524 aa, unidentified
  REGION 1..524: note = Description of Unknown: uncultivated organism sequence
  REGION 1..524: note = Category: MG91 effectors
  REGION 1..524: note = Description: MG91-29 effector
MTEVFVLELPLQVEKYQADILNRRYEQLRQLYNYVQGKLLRQYRYFEQMKEYQACKTFKDKKDFLKKHPFQVKGVYGSNKELLDITFDEYGIQGFVSKLGKKCVCSNTTYADLGITSTILDRLSLAVWSSWEKMLYSFQTKRLSFKKFGELDTISNRRIVARGKVCFPGMELHLEKMELAIKLNGKTGKNAKFITLPILHNPKHADYEMWALKGGIDSVKVITVVRRLVRGQYKYYVQLSIEGEKPLKGRTLGKGNVGIDLGPTTVAISGNNNVSIDKLAPKCDNTQREITRLSRKIDRSRRANNPQNFNEDGTIKRGIRLVWNDSKRYKALRRELAELQRRQAAIRKQQHIDRANELLKEGDTFIVENNSISGWAAKAKETKVSEKTGKIQKKKRFGKSIANHAPAMFVNILENKVKSLGGQVVKVDTKNAASQYDFTDNSLEKHELNERNVTLSNGDTHQRDMLAAFNLQHLKYDAKESKQYDVEAMNKDYDRFCQLEEAEIMRYKNKEKKDDRSTIGVGKL

SEQ ID NO: 2839 - protein, 353 aa, unidentified
  REGION 1..353: note = Description of Unknown: uncultivated organism sequence
  REGION 1..353: note = Category: MG91 effectors
  REGION 1..353: note = Description: MG91-30 effector
MKKSVSIKVAAKVNTNISDEKPKDLRNRFLSTQNYRLLSAVSRFATDYVQGIIRVNDLVEMKCNELKGQDLIDSAVCQGDCRKKFSKGAKYLFCVVDSAADVNDVAVRWNKFKLVCNTCSNDYAFNAQYEVMQLYPTVSLADVERLCAVGFLTKYIFPINLEYTESRTETEVPGYHNFYKIVKSIVKDKKHNEQITKIQLCTYGRDLFTETDYDCAMKSGVDAYGGMTFELDFYPHDSNMMTFLETYKDTKPLTYFYRVTKRIYSSRFDYVVYFPIKCTRYCKFCKASKIYAKNNPVLYCSQCGFTDAMFFKNSPLLSTVTFFDECVKSKTLKPKRIFYYDMALYKTMIKKVK

SEQ ID NO: 2840 - protein, 527 aa, unidentified
  REGION 1..527: note = Description of Unknown: uncultivated organism sequence
  REGION 1..527: note = Category: MG91 effectors
  REGION 1..527: note = Description: MG91-31 effector
MNEVFVLELPLQVEKYQEDILDKRFEQLRQLYNYVQGKLLRQYRYFEQTKEFQACKTIKEKRDFFRNHPFHFNGIYGNNNELFNITFDEYGVNGFVSKMAKKQVGANMTYADLGITTTLLDRLSLAIWASWEKKMYDYHTKRISFKKHGELNIFGSRKKTNGSGKKMFSGMELNLERMEVSIKLNGKVGKKAKYITLPILHNPKHVDYEMMALKGGFDSVKVITVVRRLVRGRYKYYLQMSIEGEKPKKDRTLGKGNVGIDIGPTTVAVSGENIASIDKLASKCDSIEAEKARLGRKIDRSRRANNPQNFNEDGTIKRGVRLVWNDSKRYKVLRREMTELQRRQAAIRKQQHIDRANELLKEGDTFIVENNQISGWTRKAKETKVNEKTGKIQKKKRFGKSVANHAPSMFVTILENKVKSLGGQVVKVDTKNAASQYDFTNDSFEKHELNERSVTLSNGDTHQRDMLAAFNLQHLKYDAQEKKQYDREAMTQHYDRFCKLERAEIMRYKNKEKRDDRSTIGAGELNT

SEQ ID NO: 2841 - protein, 525 aa, unidentified
  REGION 1..525: note = Description of Unknown: uncultivated organism sequence
  REGION 1..525: note = Category: MG91 effectors
  REGION 1..525: note = Description: MG91-32 effector
MNSDTFIMELPLIVEKFQSDELDKRFEILRRIYNMAQNKLERQFCYLSKFKEYQECTTKKAKGEFIKKHPFSFKDILDKSGNPLMITFTKYDIQGYLSKFAKLKIDSQYTYSDMGINTSMLMHMGMAIWSAWEKVIFDSKADKISYKKYGDLKSIGVDWEPKHPAGFILNLRKGELKLNLNNRQGQYARYITMKIRFGKKEHQVWYEGDALNAGEDSIRVLTIVRRKIRGRYNYYLQMTIRNNKPQKGRTLGEGRVAIDLGTSKIAVVAKDKVHLLPLSPSILSVSDELRIIQRQMDRSRRANNPHKYHEDGTVKKGNHDKWVNSKEYIRLRNMKAELERKQAAVRKQDHIALANYLLSLGNEFVIEDNDVQEWAKRKKEEKRRKSDGKNLSKAGLGKQIGNHAPSMFVTILKNKVESLGGTFVKVDNNNRATDYDFTNNTFNEHKLEERYITLGNGNRHQRDTLAAFNLYHLDTAPEKEKCYNLYEMRKHYAQFCEFEKEALLRWKGMTPKREKMKVREHERGL

SEQ ID NO: 2842 - protein, 607 aa, unidentified
  REGION 1..607: note = Description of Unknown: uncultivated organism sequence
  REGION 1..607: note = Category: MG91 effectors
  REGION 1..607: note = Description: MG91-33 effector
MAKEEFVLTLPLKVEKWQADILDKRYELLRQVYNMVQQKLVRQYIYFSQQKAYRDCKNFEQRRGFFEAHPFHVKSVKGKNGELCDIKFPYTYKSRGGSSGKRAPNGISDYVSKLWSHKIGQNKTLADFGINSYIMEELGLHIMKAWEDRLYKPKSKRVSFKDYGEINSFGSRNKNGNFAGFTINLDNGIITYKTNGRQGQFADLIQLPIDFSREKNGYASEALKGGIESLKKLLIVRRCIRGENKYYLQLTISGEKPQKGRTLGKGNVGIDIGPSTIATSSLNGVYFDKLADKCDNIEHELYLINRKLDRSRRANNPQNYNEDGQIKRGVRLVWKKDKDVKRYTTLKLQRKELYRKQAEIRKLQHLEMANAMLSEGDTFIVENNPIDAWVRRTKETTKTKAGKNRCKKRYGKSVANHAPAMFVSILKNKVLSLGGKFYEIDPRNAATQFDFSNGEFTKHEVSERSITLSNGRTHQRDMLSAFNLQHIVLQNKELKEYDIEQMEADYPIFCRLENTELERFKEARHKERDALYFVGASEKQMRRQPQEESVANRHNGGVGRKHCNTSLGGGNAKITGNGLARESIERVSQVPDERHLSGCVPISLDGL

SEQ ID NO: 2843 - protein, 484 aa, unidentified
  REGION 1..484: note = Description of Unknown: uncultivated organism sequence
  REGION 1..484: note = Category: MG91 effectors
  REGION 1..484: note = Description: MG91-34 effector
MAHKENQKAFVVTFPLRTEKWQEDRIDKMMRMLTNFYNDRQRKLVRRYIYLSHSKAYKEAKSKGVVAFKNYMKEHGFSQYGLDAFFKADTKGALYQCGLNSMFLQYLSQCAWSAWDKKLFGKGDFVKTDKVVNIFCSRNMKGSFCGFDYDLSTFTIRIKSTCTKEIICTIPFVVNKNSEYELYALSQKICRIGIVRKLIRSKYKYYVQFTFDGVPYNKGRNIGTGIVGIDPGPSKIAIVGDNKVEIAKLAPGIEEDERKTARLKRKLDRSRRATNPHMYKEDGTNIKGQRQICFSKSYNETRKQLAEAQRKLAAKRKIAHNELANTLLEYGDTFKVEANSYKSMQARTKATSMTKSGRIRSKKRYGKSIKNRAPSEFLVILKNKLLHYPNGKYYAVPASYACTQFDFTNESFTEHKISERKIVTSDGVQHNRDTLAAFNIKNAIVNETSTKKKKITKSNEFFDIVRMKASYNEFCLMERYLLSI

SEQ ID NO: 2844 - protein, 383 aa, unidentified
  REGION 1..383: note = Description of Unknown: uncultivated organism sequence
  REGION 1..383: note = Category: MG91 effectors
  REGION 1..383: note = Description: MG91-35 effector
MFLQYLSQCAWSAWDKKLFGKGDFVKTDKVVNIFCSRNKKERFCGFDYDLSTFTISIKSTCTKKIICTIPFVVNKKSDYELFALSQRICRIGIVRKLIRGKYKYYVQFTFDGVPYNKGRNIGTGIVGIDSGPSKIAIVGDEKVEIAKLAPNIEEDERKTARLKRKLDRSRRATNPHMYKEDGTNIKGQRQTCFSKVYNETRKQLADAQRKLAAKRKIAHNELANTLLEYGDTFKVEANSYKSMQARTKATSMTKSGRIRSKKRYGKSIKNRAPSEFLVILKNKLLHYPNGKYYAVPASYACTQFDFTNESFTEHKISERKIVTSDGVQHNRDTLAAFNIKNAIVNETSAKKKKITKSKEFFDIVRMKASYNDFCLMERYLLSV

SEQ ID NO: 2845 - protein, 530 aa, unidentified
  REGION 1..530: note = Description of Unknown: uncultivated organism sequence
  REGION 1..530: note = Category: MG91 effectors
  REGION 1..530: note = Description: MG91-36 effector
MTSQSFVIELPIAVDDAEMRTIVRKLEFARQLHNATLGTAIGQLQQMRQDTAWKQACAMPKGKERTAAFRALDRKYGLTEYDLHSVIARHREGSGRKAELGINETQKIATRVFQAINRYKLGLGGMPRFKSSKRGLHSIEGKTNKTGLKFRPEKKVLNWCGHDYRVLIDPKDDYIQRALKENERSDKYRKIKYCRLVRKRIRSSDRFFLQVVLEGTAPVKHVYAPVTERAAIDPGPQSIALFSKEFAGKIQVAGSNNFNEAVSRRLLRAMDRSLRRNNPDAYNEDGTIKKGAKLVKSKNYQRKVDRLREMHREAAAERKCRHGQTINLLLSIAGDIRIEKNSWKAFQRGHFGKSLGKSAMSGFIAQLKSKAASAGLKVTEVNPYKLKLSQYDPYTDTYRKKDLSERWQEMKAGSGQYIQRDVLSALLLYCADIEKEIHIPKVAVEQLEGAKQFLTDAGYVVLKSTSSRDQRDPRLASEPKAMTPEMARQKILRGAGDSHLPTDQELGQIRAGGKVSTWSKETFPLQRGVV

SEQ ID NO: 2846 - protein, 614 aa, unidentified
  REGION 1..614: note = Description of Unknown: uncultivated organism sequence
  REGION 1..614: note = Category: MG91 effectors
  REGION 1..614: note = Description: MG91-37 effector
MAKENFVLTLPLKVEKWQADILDKRYELLRQVYNMVQQKLLRQYIYFSQQKAYKECKTFQQKREFFDSHPFYIKIDDKPCEIKFPYTKKNSNTAPNTISNYVSGLGSHRVGQDKTLSNLGINSIILEELGIHIMKAWGDRIYNSKSEHISFKKYGEVNSLVSRYKKKKQTGKVYFPGFTINLEERYITYNTNGRQGNQAKLIKLPIDFSREKKRYAAEALKDGIDSIRKLSVVRRCIRGKNKYYLQLVIDGEKPQKGRTLGRGNVGIDIGPSTIATSSLLGVHFDKLADKCDNIEHELYLIDRKLDRSRRANNPQNYNEDGTYKRGVRLVWKKDSEVKRYAKLKAARKELYRRQAEIRRRQHLEMANAMLQLGDTFIVENNPIDAWARRAKETKKTKSGRTRCKKRYGKSIAHHAPAMFVTMLENKVKSLGGEFYRVDAYGYAATQFDFTNKKFTKHAVNERSITLSNGHTHQRDMLSAFNLQHARLEGEKTKSRDKEKKVESYDIEQMQADYPIFCRLEAEEQKRFRVAWHNEKDALYFVGASGKQLRHQSQEKSAANRHNGGVDRNHCNTRLGKENAEITGSGFARESIARVSQVPDEYHQHGQQSIIIDGL

SEQ ID NO: 2847 - protein, 372 aa, unidentified
  REGION 1..372: note = Description of Unknown: uncultivated organism sequence
  REGION 1..372: note = Category: MG91 effectors
  REGION 1..372: note = Description: MG91-38 effector
MIRNLKIECFVRDNDLHAKIRASVRLYRACLRAAFSYCALAETAGAEIVAENGNVTVKPNDEKAREILSACVGHSGKIKYYEMYHWMKELYPSLISNCYSKIQYIIGKMMTMKDQDIKKCQKKFLIVNGKRAFAQFNRSGIPIKSGMAKIDGHLLKCRWDKDIGEVEFTTNKMDSSTYYAFSSLREGWEGWSIKDSYLSFDEDKNKIVVILSYERPDTPTNIEPEKVMHVEFTDDKEMFITCYTDDKWSARPFSAAGIIGYLEEMEQIYSRYWSEFKSYERRERKQRNHVKEKLNRYTERRANAEKNNNHLWSKRIVDFARQQCAGKLVVVNLPEKTLFDLPYGWFDFKTKLDYKMKEIGGTVSFVTVDKDK

SEQ ID NO: 2848 - protein, 614 aa, unidentified
  REGION 1..614: note = Description of Unknown: uncultivated organism sequence
  REGION 1..614: note = Category: MG91 effectors
  REGION 1..614: note = Description: MG91-39 effector
MAKENFVLTLPLKVEKCHADILDKRYELLRQIYNMVQQKLVRQYIYFSQQKAFKACENFDQKREFFNKHPFHFKGIKGKNGELSDIKFPYTYESRSSSSGKRPSGGISDYVAKLWSHKVGADKRLVDFGLNASIMEELGLHIMKAWEDRLYKFKAKRVSFKEYGEINTLGCRLKGNFAGFTINLEEGFITFNTNGRHGKFADLIKLPIDFSREKRGYAEDALKGGVDSLRKLVIVRRCIRGRNKYYLQLTISGEKPQKGRTLGIGDVGIDIGPSTIATSSLQGVHFDKLAEKCDNIEHELYLINRKLDRSRRANNPDNYNHDGTIKRGVRLVWKKDKDVKRYASLKQQRKELFRRQAEIRKLQHLEMANAMLSQGDTFIVENNPIDAWVRRAKETKKTKTGKNRSKKRYGKSVANHAPAMFVTILENKVKSLGGVFYKVDPGYAATQFDFTNGVFTKHEVSERSITLSNGRTHQRDMLSAFNLQHARLEVEKAKSRDKEKKVESYDIGQMQADYPIFCRLETAEQERFKNARRNERDALYFVGALAKELRHAPQEETVANRHNGGVGRKHCNTLCPENAKITGNGLVRESVARVSEAPEECYHTGDQPIILDGL

SEQ ID NO: 2849 - protein, 484 aa, unidentified
  REGION 1..484: note = Description of Unknown: uncultivated organism sequence
  REGION 1..484: note = Category: MG91 effectors
  REGION 1..484: note = Description: MG91-40 effector
MAHKENQKAFVVTFPLRTEKWQEDRIDKMMRMLTTFYNDRQRKLVRRYIYLSHSKAYKEAKGKGVVAFKNYMKENGFSQYGLDAFFKADTKGALYQCGLNSMFLQYLSQCAWSAWDKKLFGKGDFVKTDKVVNIFCSRNKKERFCGFDYDLSTFTISIKSTCTKKIICTIPFVVNKKSDYELFALSQRICRIGIVRKLIRGKYKYYVQFTFDGVPYHKGRNIGTGIVGIDPGPSKIAIVGDNKVEIAKLAPNIEEDERKTARLKRKLDRSRRATNPHMYKEDGTIIKGQRQTCFSKVYNETRKQLADAQRKLAAKRKIAHNELANTLLEYGDTFKVEANSYKSMQARTKATSMTKSGRIRSKKRYGKSIKNRAPSEFLVILKNKLLHYPNGKYYAVPASYACTQFDFTNESFTEHKISERKIVTSDGVQHNRDTLAAFNIKNAIVNETSTKKKKITKSNEFFDIVKMKASYNEFCLMERYLLSI

SEQ ID NO: 2850 - protein, 484 aa, unidentified
  REGION 1..484: note = Description of Unknown: uncultivated organism sequence
  REGION 1..484: note = Category: MG91 effectors
  REGION 1..484: note = Description: MG91-41 effector
MAHKENQKAFVVTFPLRTEKWQEDRIDKMMRMLTTFYNDRQRKLVRRYIYLSHSKAYKEAKGKGVVAFKNYMKENGFSQYGLDAFFKADTKGALYQCGLNSMFLQYLSQCAWSAWDKKLFGKGDFVKTDKVVNIFCSRNKKERFCGFDYDLSTFTISIKSTCTKKIICTIPFVVNKKSDYELFALSQRICRIGIVRKLIRGKYKYYVQFTFDGVPYHKGRNIGTGIVGIDSGPIKIAIVGDNKVEIAKLAPNIEEDERKTARLKRKLDRSRRATNPHMYKEDGTIIKGQRQTCFSKVYNETRKQLADAQRKLAAKRKIAHNELANTLLEYGDTFKVEANSYKSMQARAKATSMTKSGRIRSKKRYGKSIKNRAPSEFLVILKNKLLYYPKGKYYDVPSSYACTQFDFTNESFTEHKISERRIVTSDGIQHNRDTLAAFNIKNAIVNDTSTKKKKVTKSKEFFDIVRMKASYNEFCLMERYLLSV

SEQ ID NO: 2851 - protein, 528 aa, unidentified
  REGION 1..528: note = Description of Unknown: uncultivated organism sequence
  REGION 1..528: note = Category: MG91 effectors
  REGION 1..528: note = Description: MG91-42 effector
MNEVFVLELPLRVEKYQADILNKRYEQLRQLYNYVQGKLLRQYRYFEQMREFQDCKTFKAKREFIKSHPFHVNGVIGRNKELLDIYFDEYGILGFVAKLGQKPIGSGMNYTDMGISSTILSNLSANIWSAWNKKLYDYRAERIAFKRHGGLNTFGSGKIVQKKDGEVKEYFPGMVLRLESMELDIKTNGKLGKNAKFITLPILHNPKHADYEMWALKGGMRSVKVLTVVRRMVRGQYKYYLQMSIEGEKPQKGRTLGKGNVGIDLGPTTVAVSGENIVSIDKLASKCDNIQKEITRLARKIDRSRRANNPQNFNEDGTVKRGIKLVWNDSKRYKELRREMAELQRRQAAIRKQQHIDRANELLKEGDTFIVENNQISGWTRKAKETKVNEKTGKIQKKKRFGKSVANHAPAMFVTILENKVKSLGGEVVKVDTQNAASQYDFTNDSFEKHELKERSITLSNGDTHQRDMLAAFNLQHLKYDDKEKKQYDTEAMKEHYERFCELEQEEIQRYKDKEKKDDRSTIGAEKL

SEQ ID NO: 2852 - protein, 524 aa, unidentified
  REGION 1..524: note = Description of Unknown: uncultivated organism sequence
  REGION 1..524: note = Category: MG91 effectors
  REGION 1..524: note = Description: MG91-43 effector
MIEVFVLELPLQVEKFQADILNKRFEQLRQLYNYVQGKLLRQYRYFEQMREFQACKTIKEKRDFFRTHPFHINGVLDRRGDLLDITFDEYGIQGFVEKIIHKSVSTNTSYADLGFNTLILDYLSASIWSAWDNKLYNLKTKHISFKKYGELDSFSTRKKLVKEKLYFSGIELHLDKMELAIKMNGKVGKNAKFITLKMLHNPKHADYEMWALKGGVDSVKVVKVVRRLVRSQYKYYVQLTIEGEKPQKGRTLGKGNVGIDLGPTTVAVSGENVVSIDKLASKCDNIQEEITRLSTKIDRSRRANNPQNFNEDGTIKRGIKLVWNDSKRYKELRRELAELRRKQAAIRKQQHIDRANALLKEGDTFIVENNQISGWATRAKETKVNEKTGKIQKKKRFGKSIANHAPSMFVSILENKVKSLGGEVVKVDTKNAASQYDFTDGSFTKHELKERNVTLSNGDTHQRDMLAAFNLQHLKYDEKDTKQYDTEAMTADYERFCQLEQEEIQRYKNKEKKDDKGTIGAEKL

SEQ ID NO: 2853 - protein, 527 aa, unidentified
  REGION 1..527: note = Description of Unknown: uncultivated organism sequence
  REGION 1..527: note = Category: MG91 effectors
  REGION 1..527: note = Description: MG91-44 effector
MNEVFVLELPLQVEKYQEDILDKRFEQLRQLYNYVQGKLLRQYRYFEQTKEFQACKTIKEKRDFFRNHPFHFNGIYGNNNELFNITFDEYGVNGFVSKMAKKQVGANMTYADLGITTTLLDRLSLAIWASWEKKLYDYHTKRISFKKHGELNIFGSRKKTNGSGKKMFSGMELNLERMEVSIKLNGKVGKKAKYITLPILHNPKHVDYEMMALKGGFDSVKVITVVRRLVRGRYKYYLQMSIEGEKPKKDRTLGKGNVGIDIGPTTVAVSGENIASIDKLASKCDSIEVEKARLGRKIDRSRRANNPQNFNEDGTIKRGVRLVWNDSKRYKVLRREMTELQRRQAAIRKQQHIDRANELLKEGDTFIVENNQISGWTRKAKETKVNEKTGKIQKKKRFGKSVANHAPSMFVTILENKVKSLGGQVVKVDTKNAASQYDFTNDSFEKHELNERSVTLSNGDTHQRDMLAAFNLQHLKYDAQEKKQYDREAMTQHYDRFCKLERAEIMRYKNKEKRDDRSTIGAGELNT

SEQ ID NO: 2854 - protein, 615 aa, unidentified
  REGION 1..615: note = Description of Unknown: uncultivated organism sequence
  REGION 1..615: note = Category: MG91 effectors
  REGION 1..615: note = Description: MG91-45 effector
MAKEVFVLTLPLKVEKWQADILDKRYELLRQTYNMVQQRLLRQYIYFSQQKAYKACETFVQRRDFFASHPFHFKGIKGKNGESSDIKFPYTYESRSSNTGKRPSGGISDYVSKLWSHRVGQDKTLADFGINSYLLEELGLHIMKAWEKRLYDPQSSHVSFKKYGDVNSFGSRYKKDKKSNRITFPGFAIDLVKGYIVYNTEGKRVKTNPFVLPIDFSREKKEYALESLKGGVDSIRKLLIVRRCIRGRNKYYLQLSIKGEKPQKGRTLGKGNVGIDIGPSTIAVSSLQGVHFDKLANKCDNIEHELHLLNRKIDRSRRANNPQNYNEDGTVKRGVRLVWKKDKDAKRYANLKQIRKELHRRQAAIRKQQHLEMANALLSQGDTFIVENNPVDAWVRRAKETTKTKTGKNRCKKRFGKSVANHAPATFVSILKNKVLSLGGQFHEVDIHNAATQFDFTSQQFTKHELGERSVKLSNGNTHQRDMLSAFNLQHLRAQSEENKDYDIEQMKADYPIFCKLETAEKERIKGERSVERDVLFYIGASTQDMRQQPQKSTVVNRHNGGVGRKHCNTRLGSRKKENAEITGSGLVRESIERVSQVPDEYHHFGIQSVILDGL

SEQ ID NO: 2855 - protein, 605 aa, unidentified
  REGION 1..605: note = Description of Unknown: uncultivated organism sequence
  REGION 1..605: note = Category: MG91 effectors
  REGION 1..605: note = Description: MG91-46 effector
MIEEFVLTLPLKVESWQADILNNRYEHLRRIYNMVQRKLLRHYIYLSQQNEYRQCKDNDEKRTFWENHPITFKDFCDKNGNPAIVKFPYTYSHRSKDSGKKASNGISDFVPKFKNRNIGGGLTYGSLGINASILENLGLRIEQAWKKRLYDPKSKHISFKEEGDLNTLGCREKNGFSGFVLDLQKMTLSFNTNGRQGKSAKFIHFPINAGKELTEYEMYALKGGIGSIRKIVVSREYVRGRYKYYVQLTIKGEKPQKNRTLGKGTVGIDVGPSTVAVSSLHGVSLDKLADKCDNIEHDLWRINRKMDRSKHETNPDFFNEDKTYKKPEKGERRKWTFSNRYKRLKLERRELYRKQAAISKQQHIDMANALLSQGDEFIVENNPIDSWAKRAKETKRGKNGKIRCKRRFGKSVAHHAPAMFVSILQNKVRSLGGTFHKVEIKNAATQFDFTNGEFTKHELNERTVTLSNGRTHQRDMLSAFNLQHLRPDSEETKDYNIEQMEADYPVFCKLEEKGIAQFKEKRQQERDVAYFTGVSHKTLKFSSANRHNGGVGRKNCNHHAGSKRNVAETGNKSSSKEYCESMETVSLVPNEYHHSNHQHLRLDGL

SEQ ID NO: 2856 - protein, 533 aa, unidentified
  REGION 1..533: note = Description of Unknown: uncultivated organism sequence
  REGION 1..533: note = Category: MG91 effectors
  REGION 1..533: note = Description: MG91-47 effector
MNEVFVLELPLRVEKYQADILNKRYEQLRQLYNYVQGKLLRQYRYFEQMREFQDCKTFKAKREFIKAHPFQISGISGSNKQPLDITFDEYGIRGFVEKLAQKSAGPNVTYADLGFTTYILDHLSVSIWSAWDKMLYDYHAKRVSFKKYGELDSFSSRRKIVGGKVYFSGMELHLDTMELSVKLNGKQGANAKFITLPILHNPKHADYEMWALKGGLVSVKVVKVIRRMVRSQYKYYVQLTIEGEKPQKGRTLGKGNVGIDLGPTTVAVSGDNIVSIDKLASKCDNIQKEITRLARKIDRSRRANNPQNFNEDGTVKRGIKLVWNDSKRYKELRREMAELQRRQAAIRKQQHIDRANELLKEGDTFIVENNQISGWTRKAKETKVNEKTGKIQKKKRFGKSVANHAPAMFVNILENKVKSLGGEVVKVDTQNAASQYDFTNDSFEKHELKERSITLSNGDTHQRDMLAAFNLQHLKYDDKEKKQYDTEAMKEHYERFCELEQEEIQRYKDKEKKDDRSTIGAEKLHMNDGTVKK

SEQ ID NO: 2857 - protein, 650 aa, unidentified
  REGION 1..650: note = Description of Unknown: uncultivated organism sequence
  REGION 1..650: note = Category: MG91 effectors
  REGION 1..650: note = Description: MG91-48 effector
MSEKSLIVYSASLKDKKISNILDSNSIPLVYLHNIKIDILNKITNNVLKYFNTNIKGIIKSNNIDEYTKKFNIFNKKIISHPDFDKFRLNIKNNIKNNILSLPTLIKTPEFFIHEKRIDGNKQLVNTGRTITKQLLINMCGGDNAIDYTNYLNKPIKKFSIIKYYNYLFISKKEVNLTGILEMQLNSNEEENLSNFKIKCKEYFSKIDVENDEFIRVILNVTYVNDKRDKIITYITTESKNQSNYYNFVNNLKFAMFIDNETSRFTNNQISKTKYSKLHEHIDYYNYTLRIEKTAINKDTGIRKDPIPYKYEKWDNEQYKYNSIKITKGIMFYKLDDTYNHKTRNKYNIVFKLNKFFKNKLTYDSYKNLLKNNQIFDNKANINDIEFEIELIVPKDINIQTFRLVRLIKSCDIWDAHFTFEDDNKYYTNSNNNVYFDRNINNLIGIDDNSELYNIDMPQHNKKSKKLYFKIKNIQKRLSKNNNEINNKILKKYNKKRTNYKKTILQQECKKIVEKGGNIYLEKNNISNMTKSAKGNSLNNGKNVRAKSKLNRKLLDSNFKFIEEQLEKNTKRYGKKFVPINTNHSPSQHCPNCNTKYEKTNNYTYRTCSSCNLSFDRDIAANINNIKENKGHTSQQIQNHINKYKNKKIK

SEQ ID NO: 2858 - protein, 535 aa, unidentified
  REGION 1..535: note = Description of Unknown: uncultivated organism sequence
  REGION 1..535: note = Category: MG91 effectors
  REGION 1..535: note = Description: MG91-49 effector
MATENFVLELPLKVEKWQADILNKRYEYLRQIYNYVQRKLIRQYRYFEQMDEFRQCTTYKEKREFFKSHPFYFKDIVGRNGEPFAIKFPYSMSASSGSKMDGFSGYIAKLGKLPAGANKSYSDLGINSFMLERLASNMWAAWNKYLYDRDSKRVSFKKYRDLNTFGSRKANNTTFIGMEIHLDSMEVIIKTNGKLGKYAKYITLPIDYKHSMTEYEMFALKGGFDSIKILNVVRKEIRGREKYYVQLTIEGEKPQKGRMLGKGNVGIDLGPSTIAVSSRQKVSIDKLANKCDDIQRDLYVVSRKMDRSRKANNPQNFNEDGTIKPISRKNGERRYWNDSKRYERLRSERKELLRKQAAIRKLQHIETANALLELGDTFIVENNPVSGWTRKSKETKLNKKGRIQSKKRFGKSVANHAPAMFSTILENKVKSLGGQFKKVDVKNAASRFDFTNGEFTEHKLNERVITLSNGDKHQRDLMAAFNLQHLNLDGDLSKDYDVEMMQRDYPDFCRLEREEMDMYLQGIKKNERTTIGAFK

SEQ ID NO: 2859 - protein, 528 aa, unidentified
  REGION 1..528: note = Description of Unknown: uncultivated organism sequence
  REGION 1..528: note = Category: MG91 effectors
  REGION 1..528: note = Description: MG91-50 effector
MNEVFVLELPLQVENYQADILNKRYEQLRQLYNYVQGKLLRQYRYFEQTKEFQECKTFKAKREFIKAHPFQIKGVLGRNKKLLDIFFDEYGILGLVAKLGQKPIGSRKTYTDMGISSTILANLSDNIWSSWNKKLYDYHANRVSFKKFGELNTFGSGKIIQKKDNEVKEYFPGMVLHLDKMEIDIKTNGALGKKATFITLPILHNPKHADYEMMALAGGSRSIKVLNVVRRLVRGQYKYYLQMTIEGEKPQKGRTLGNGNVGIDLGPTTVAVSGENVVSIDKLASKCDNIQEEITRLSRKIDRSRRANNPQNFNEDGTIKRGIKLVWNDSKRYKELRRELAELRRKQAAIRKQQHIDRANALLKEGDTFIVENNQISGWTTRAKETKVNEKTGKIQKKKRFGKSVANHAPSMFVSILENKVKSLGGEVVKVDTKNAASQYDFTNGSFTKHELKERNVTLSNGDTHQRDMLAAFNLQHLKYDEKDTKQYDTEAMTADYERFCQLEQEEIQRYKNKEKKDDRSTIGAEKL

SEQ ID NO: 2860 - protein, 490 aa, unidentified
  REGION 1..490: note = Description of Unknown: uncultivated organism sequence
  REGION 1..490: note = Category: MG91 effectors
  REGION 1..490: note = Description: MG91-51 effector
MARENENSGCFVVTFPLKTEKWQEDRIDKILTLLTVRYREKQKILLDRYIHLSHSPEFKEAKNAGLKALRDFMNEHKFTKYDVEKVFSDSSLSKSVTTDIMLTHGINSSIMQELSHRAWSAWEKKLYGQGKFIKLDNEVNIFKSRLKGSTITGFEYSFTDMTLSMNATKPKKHTMFTIPFVVNRKSEYEAYAMDCEVRNIAIMRQQIRGKNKYYVQFSFAGTPYNKGRKIGTGIVGIDPGPSKIAIVSDSEIRITTLAPSVNRDERAICRMQRKLDRSRRATNPDNYNDDGTIKRGIKLTFEKSNSYKRTQTKLADTQRKLAAKRKIDHNILANEIIAMGNEFHVENNSFKSMQARSKETKKNDKGKNMSKKRFGKSLANRAPSELLTILKNKVNQYADGDYVDIPSGVACTQFDFTNGEFTKHELKERTITTSDGVVHDRDALAAFNMRFVHKKKIEGKKKIEKDKENFDILAMTEAYRQFCSLEKNIK

SEQ ID NO: 2861 - protein, 518 aa, unidentified
  REGION 1..518: note = Description of Unknown: uncultivated organism sequence
  REGION 1..518: note = Category: MG91 effectors
  REGION 1..518: note = Description: MG91-52 effector
MDKEVFVIEFPLNVEKWQADILNKRYEHLRTLYNYVQGKLLRQYIYFAQMGEYKNCKTPKERREFFKTHAFHIKGISGRNNITFTEYGIHSLVTKLAQHRIGADCTYRDKGINSMILDHMAAYIWSSWNKKLYDINARRISFKNFGEINTFGVRKINGARFCGLNLHLDIMTLDIKINGKNGQQAKFISLPVRYNLKHAGYEMNALAGGFDSIKVLTVVRRMVRGRYKYYLQMTIEGVKPQKGRHLGNGRVGIDIGPTTIAVSSNSTVSIDKLAAKCDNIEQDIQRIGRKIDRSRRAMNPDNFNADGTVKRGVRLTWVKSERYKALCQEKAELQRKQAAIRKAQHIERVNTLISEGDTFIIESNPIKGWTARAKETKVSEKTGRFQKKKRWGKSVANHAPSMFVTILENKVKSLGGTVIKADVKNAASQYDFTDGTFTKHELDERGVTLSNGDTHQRDMLSAFNLQHLIYDTKELKQYDQQQMEIHYPRFCELEQQEIEKYKQRIKTDDRSTIAASRL

SEQ ID NO: 2862 - protein, 528 aa, unidentified
  REGION 1..528: note = Description of Unknown: uncultivated organism sequence
  REGION 1..528: note = Category: MG91 effectors
  REGION 1..528: note = Description: MG91-53 effector
MKEVFVLELPLRVEKYQADILNKRYELLRQLYNYVQGKLLRQYRYFEQMKDYQICKTFKDKREFIKAHSFHINGVLGRNKELLDISFDEYGIMGLVTKLGQKLIGSGKTYTDMGISSTILANLSDNIWSSWNKKLYDYHADRITFKKYGSLNTFGSGKIVQKKDNEVKEYFPGMVLHLERMEIEIKTNGGLGKKATFITLPILHNPKHADYEMMALAGGSSSIKVLTIVRRLVRGQYKYYLQMSIEGEKPQKGRMLGKGNVGIDLGPTTVAVSGENIACIDKLASKCDNIQAEITKLARKIDRSRRANNPQNYNEDGTIKRGIKLVWYDSKRYKELRRELAELRRKQAAIRKQQHIDRANALLKEGDTFIVENNQISGWTTRAKETKVNEKTGKIQKKKRFGKSVANHAPSMFVTILENKVKSLGGQVVKVDTQNAASQYDFTNDSFTKHELKERNVTLSNGDTHQRDMLAAFNLQHLKYDEKEKKQYDKEAMKAHYEHFCELEQEEIQRYKNKEKKDDRSTIGAEKL

SEQ ID NO: 2863 - protein, 524 aa, unidentified
  REGION 1..524: note = Description of Unknown: uncultivated organism sequence
  REGION 1..524: note = Category: MG91 effectors
  REGION 1..524: note = Description: MG91-54 effector
MEEVFVLELPLQVEKYQADILNKRYEQLRQLYNYVQGKLLRQYRYFEQMSEFQGCKTIREKRDFFRSHPFHIKGKLAGNKELPEITFDEYGINGFVEKLAQKSAGSNTTYADLGFTTYILDHLSTSIWAAWEKMLYDYRAKRISFKKYGELDSFSSRRKVVGGKVYFSGMELHLDTMELAIKLNAKQGKNAKFVTLRILHNPKHADYEMWALKGGLESIKVVKVVRRLVRGQYKYYLQMSIEGEKPKKGRTLGKGNVGIDLGPTTVAVSGENIASIDKLASKCDNIQEEITRLARKIDRSRRANNPQNFNEDGTIKRGVRLVWNDSKRYKALRREMAELQRRQAAIRKQQHIERANELLKEGDTFIVENNQISGWTRKAKETKVNEKTGKIQKKKRFGKSVANHAPSMFVTILENKVKSLGGEVIKVDTQNAASQYDFTNNSFEKHELKERSVTLSNGDTHQRDMLAAFNLQHLKYDKQEKKQYDTEAMAQHYERFCELEQEEIMRYKNKEKKDDRSTIGAGEL

SEQ ID NO: 2864 - protein, 609 aa, unidentified
  REGION 1..609: note = Description of Unknown: uncultivated organism sequence
  REGION 1..609: note = Category: MG91 effectors
  REGION 1..609: note = Description: MG91-55 effector
MAKEEFVLTLPLKVEKWQADILDKRYELLRQVYNMVQQKLVRQYIYFSQQRVYKDCKNFEQRRKFFEDHPFHIKGVKGRNGELCDIKFPYTYKSRGGSSGKRSPNGISDFVSKLWSHKIGQDKTLADFGINSSIMEELGLHIMKAWEYRLYKPKSKRVSFKEYGEINSFGSRKKNGIFGGFTLDLEKGYITYKYRKRNEKGDRTDFIQLPIDFSREKKGYPKEALKGGIDSLKKILIVRRCIRGGNKYYLQLTISGEKPQKGRTLGRGNVGIDIGPSTIATSSLKGVHFDKLADRCDNIEHELYLINRKLDRSRKANNPQNYNEDGTIKRGVRLVWKKDKDVKRYAALKRQRKELYRRQSEIRKLQHLEMANAMLSQGDTFIVENNPIDAWVRRAKETTKTKTGKNRCKKRYGKSVANHAPSMFVSILKNKVLSLGGNFYEIDLRNAATQFDFTNGEFTKHEVGERSITLSNGQTHQRDMLSAFNLQHIVLQSKELKEYDIEQMEADYPIFCKLEAAEQERFKEARRKERDALYYVGASKKQMRRQPQEESVANCHNGGVGRKHCNTSLGNENAEITGSGLARESIERISQVPDECHHFGCDPIVLDGL

SEQ ID NO: 2865 - protein, 536 aa, unidentified
  REGION 1..536: note = Description of Unknown: uncultivated organism sequence
  REGION 1..536: note = Category: MG91 effectors
  REGION 1..536: note = Description: MG91-56 effector
MEKENFVVELPLKVEKWQADLLDKRYELLRGIYNYVQSKLLRQFRYFEQMSEWKKCKTKKDKQKFMETHPFTIRGFKKPIILCKMKSKDNKADVYGVTNFVEQIVKNKVSADKTYKDFGINTTNINALAQHIWSAWEKKLYGKPKIIKDKKTGESIKIPNKIHFKKSGDINTISLREKNGKFTGLDVDLEHMVLYFNTNGKIGAKSKKITLPIVFSNPTEYEMYSFKNGIESVRVVTIVRKLIRGKYKFYVQFTIEGEKPQKGRTLGKGEVGVDVGPSTIAVSSLSGVQINTLAEKCDNIEHACKLLERKMDRSKRATNPQNYNDDGTIKKIKSKKIKWNYSNRYIKTRNKKCELHRKQAAIRKLQHNIDCNELLKLGKIFIVENNPISAWQRKATETKINKKGKYQSKKRFGKSIANHAPAMFITILENKVKSLGGQLIRVDIRNAASRFDFTNSDFVEHKLNERKITLSNGNTHQRDLLAAFNLQHLRYNNENLKTYNIKDMERDYPIFCKLETIEINKFINSQKKSHKSTIGY

SEQ ID NO: 2866 - protein, 609 aa, unidentified
  REGION 1..609: note = Description of Unknown: uncultivated organism sequence
  REGION 1..609: note = Category: MG91 effectors
  REGION 1..609: note = Description: MG91-57 effector
MAKENFVLTLPLKVEKWQADILDKRYELLRQVYNMVRQKLLRQYIYFSQQKAYKECGKDTKKKGKFFAEHPFFIKIDGKPCEVKFPTWKKSNQTASNSIAKYVSKLSSYKLGQDKTLSDFGINSYILEELGARIMKAWEDRLYKFKAKHISKREYGDVNSFSTRIKKSDNKISYPGFTINLEEGYITYNTNGRRGGFANLIKLPIDFSREKKGYAVEALKGGLESIREISVVRKYIRGKNKYYLQLTIDGEKPQKGRTLGRGNVGIDIGPSTIATSSLMGVHFDKLADKCDDIEHELYLVNRKLDRSRRATNPQNYNTDGTFKTIKNRERRVWNYSNRYNKLKLVRKELFRRQAEIRKQQHLAMANALLSQGDTFIVENNPIDAWVRRAKETSKNKKGNYRCKKRYGKSVAHHAPAMFVSILENKVKSLGGELHKVDVGYAATQFDFTNGEFTKHAVNERSITLSNGHTHQRDMLSAFNLQHARLKTDSRNIEKTVDNYDIEQMNADYPIFCRLETAEQERFKAIRHYERDALFFVGVSNKHLRCQPQEETVANRHNGGVGRKDCNISLGSENAEITGNGLIRESIARVSQVPDECHPFAGKPIVLDGL

SEQ ID NO: 2867 - protein, 484 aa, unidentified
  REGION 1..484: note = Description of Unknown: uncultivated organism sequence
  REGION 1..484: note = Category: MG91 effectors
  REGION 1..484: note = Description: MG91-58 effector
MAHKENQKAFVITFPLRTEKWQEDRIDKMMRMLTTFYNDRQRKLVRRYIYLSHSKAYQEAKGKGVVAFKNYMKENGFSQYGLDAFFKADTKGALYQCGLNSMFLQYLSQCAWSAWDKKLFGKGDFVKTDKVVNIFCSRNMKGRFCGFDYDLSTFTIRIKSTCTKEIICTIPFVVNKNSEYELYALSQKICRIGIVRKLIRSKYKYYVQFTFDGVPYNKGRNIGTGIVGIDPGPSKIAIVSDKKVEIAKLAPNIIEDERKTARLKRKLDRSRRATNPHMYKEDGTIIKGQRQTCFSKAYNKTRKQLAEAQRKLAAKRKIAHNELANTLLEYGDTFKVEANSYKSMQARTKATSMTKSGRIRSKKRYGKSIKNRAPSEFLVILKNKLLYYPKGKYYDVPSSYACTQFDFTNESFTEHKISERRIVTSDGIQHNRDTLAAFNIKNAIVNDASTKKKKVTKSKEFFDIVKMKASYNEFCVMESYLLSV

SEQ ID NO: 2868 - protein, 484 aa, unidentified
  REGION 1..484: note = Description of Unknown: uncultivated organism sequence
  REGION 1..484: note = Category: MG91 effectors
  REGION 1..484: note = Description: MG91-59 effector
MAHKENQKAFVVTFPLRTEKWQEDRIDKMMRMLTTFYNDRQRKLVRRYIYLSHSKAYKEAKSKGVVAFKNYMKENGFSQYGLDAFFKADTRGALYQCGLNSMFLQYLSQCAWSAWDKKLFRKGDFVKTDKVVNIFCSRNKKERFCGFNYDLGTFTISIKSTCTKKIICTIPFVVNKKSDYELFALSQRICRIGIVRKLIRGKYKYYVQFTFDGVPYNKGRNIGTGIVGIDPGPSKIAIVGDNKVEIAKLAPGIEEDERKTARLKRKLDRSRRATNPHMYKEDGTNIIGQRQIFFSKSYNETRKQLAEAQRKLAAKRKIAHNELANTLLEYGDTFKVEANSYKSMQARTKATSMTKSGRIRSKKRYGKSIKNRAPSEFLVILKNKLLHYPNGKYYAVPASYACTQFDFTNESFTEHKISERKIVTSDGVQHNRDTLAAFNIKNAIVNETSTKKKKITKSNEFFDIVRMKASYNEFCLMERYLLSI

SEQ ID NO: 2869 - protein, 621 aa, unidentified
  REGION 1..621: note = Description of Unknown: uncultivated organism sequence
  REGION 1..621: note = Category: MG91 effectors
  REGION 1..621: note = Description: MG91-60 effector
MRLFDYICIILLMIQSMIEEFVLTLPLKVEPWQADILNNRYEHLRRIYNMVQRKLLRHYIYLSQQNKYRQCKDNDEKRTFWETHHVTIKDFCDKKGNPAILRFPHTYYTRSKASGKRTSHGIPDLLPKLKNRNIGSGLTYASLGINAAILENLGLRIEQAWKKRLYDHKSKHISFKEEGDLNTFGCREKDGFSGFVLDLQKMKLSFNTNGRQGKSAKFIHFPINAGKELTEYEMYALKGGIGSVRKIIVAREYVRGRYKYYVQLTIKGEKPQKNRTLGKGTVGIDVGPSTVAVSSLHGVSLDKLADKCDNIEHDLWRINRKMDRSKRDTNPDFFNEDKTYKKPEKGERRKWTFSNRYKRLKLKRRELYRKQAAIRKRQHIEMANALLSQGDEFIVENNPIDSWTKRAKETKRGKNGKIRCKRRFGKSVAHHAPAMFVSILQNKVRSLGGTFHKVEIKNAATQFDFTNGEFTKHELNERTVTLSNGRTHQRDMLSAFNLQHLRTNSEELKDYDIEQMEADYPVFCKLEEKGIAQFKEKRQQERDVAYFTGVSHKTLKFSSANRHNGGVGRGNCNYHAGSKRNVAKTGNKSSSKENCESMETVSLVPNEYHHSNHQPFRLDGL

SEQ ID NO: 2870 - protein, 517 aa, unidentified
  REGION 1..517: note = Description of Unknown: uncultivated organism sequence
  REGION 1..517: note = Category: MG91 effectors
  REGION 1..517: note = Description: MG91-61 effector
MKKKSTEETFIMELPLKVEKFQADELNKRFELMRRIYNSAQNKLERQHEYLLSFKEYKECNTKKAKGEFINNHPFSFKGVLNKNGEPMNITFTEFGLKSYLADFAKKKVDSQYTYSDFGINTSMLMSMGMAAWSAWKKVIYDPKAKDIHYKKYGDLKSIAVDWEPKHQAGMYLDVCKGVLKLNINGRRGQYAKYLTFPIKFGRKERQLWYEGDALKGGEDSFKGLAIVRRKYNGQFRYFLQLTIRNCTPTKDRTLGKGRVAIDLGIYKIAVYTGDQVYFFPLAPNCREIDEKIAVLQRQMERSKRISNPQFYNADGTYIKAKKHEHRKWNFTKEYLKLRAMKAELQRKQAAIRKQDHIDLANHLLSFGNEFVIEDNDVKAWAERKKEEKKREKDGKNLSKKGLGKPIGSHAPAAFVTLLANKVKALRGTFTKVAVDNGATDYDFINDTFTPHELKERYITLCNGVTHQRDSLAAFNLYYIDTNPEKSRCYDRKAMKRGYKKFQELEKEALKQWKKPV

SEQ ID NO: 2871 - protein, 528 aa, unidentified
  REGION 1..528: note = Description of Unknown: uncultivated organism sequence
  REGION 1..528: note = Category: MG91 effectors
  REGION 1..528: note = Description: MG91-62 effector
MNEVFVLELPLQIEKYQADALNKRYEQLRQLYNYVQGKLLRQHRYFEQMKEYQACKKIKEKRIFFRSHPFQINETLKGNKIPFKVSFDEYSIKGYIEKLVQKSVGPNMTYADLGFTTNILDHLGASVWAAWDKKLYDLKAKRISFKKYGELDSFSSRRKVVRGVVYFSGMELHLDSMELAIKMNGKVGKDAKFITLKMLHNPKHADYELWALKGGVDSVKVVKVVRRLVRSQYKYYVQLTIEGEKPQKGRTLGKGNVGIDLGPTTVAVSGVNVVSIDKLASKCDNIQEEITQLSRKIDRSRRANNPQNFNEDGTIKRGIKLVWSDSKRYKELRRELAELRRKQAVIRKQQHIERANALLKEGDTFIVENNPISSWTTRAKETKVNEKTGKIQKKKRFGKSVANHAPSMFVSILENKVKSLGGRFERVSTQNAASQYDFTTDTFKTGEEKHKLNERAITLSNGDTHQRDMLAAFNLQHLKYDEKDAKQYDTEAMTADYERFCQLEQEEILRYKNKVKKDDRSTIGAEKL

SEQ ID NO: 2872 - protein, 322 aa, unidentified
  REGION 1..322: note = Description of Unknown: uncultivated organism sequence
  REGION 1..322: note = Category: MG91 effectors
  REGION 1..322: note = Description: MG91-63 effector
MKEVFVLELPLQVEKYQADILNKRYEQLRQLYNYVQGKLLRQYRYFEQMDEFQACKTFKEKKDFFRIHPFHIDGILNNNKELLDITFDEYGVKGFVEKLVQKPVGPNMTYADLGFTTYILDHLSSSIWSAWDRMLYDYKAKRISFKRYGELDSFSSRRKVVRGKIYFSGLELHLDSMELSIKLNGKSGKDSKFITLPILHNPKHANYELWALKGGLESIKVVKIIRRMVRSCYKYYVQLTIEGEKPQKGRIIGKGRVGIDLGPTTVAISGENVVSIDKLASQCDNIQEEITRLSRKIDRSRRANNPDNYNEDGTIKRGVKLV

SEQ ID NO: 2873 - protein, 610 aa, unidentified
  REGION 1..610: note = Description of Unknown: uncultivated organism sequence
  REGION 1..610: note = Category: MG91 effectors
  REGION 1..610: note = Description: MG91-64 effector
MIIFTKISEFIISYWMPVKKDDKPRFVLEMPLKVEQWQADILNVRYELMRRMYNRARRILLSHFYYMVQKDEYQECASNKRERAVYIKNHPIFIKGVTDKKGNVKPITFTEFGIKDVVLSFVTRDVGSGKTYKDFGINTSFADCVASNLWAAWEKFMYDGKCKGVAFKRRFNTISIGKNNGCFGGLKLSLESMTLSVNVNGKQKGNAKFITLPVCGDNQSEYEMQALQGGLESICVVSIARKLIRGKYKYYLQLTIKGHAPNKGRALGCGTVGVDVGPSTVAFVSQSDVQINRLASECDDIEDVIGKIQQKMDRSRRATNPQNFNEDGTLKRISRKNGERRIWNDSRRYRLLCKQKAELQRKQAAVRKMSHILKINQILSLGDTFFVENNPISQWTKRAKETKVSEKTGRYCSKKRAGKSVANHAPAMFVTLLKNKVQSLGGRCREVDIKNAASRFDFTDGQFKVHGLDERIVTLSNNKTHQRDILAAFNLQHIICVDDDKKLKKYDIARMYADYPAFCDMERAEIEKFVSGEKETDRHTIGAIEELKVVLSSHADDPSVLYSVDKLSANSEGNKTGKKAGSALVHESNDRVLEVLNESTLFTIKDLHVT

SEQ ID NO: 2874 - protein, 597 aa, unidentified
  REGION 1..597: note = Description of Unknown: uncultivated organism sequence
  REGION 1..597: note = Category: MG91 effectors
  REGION 1..597: note = Description: MG91-65 effector
MKAIDRSFTPAVGSSPGDGHPEMKAIDRVPPVCRNSPTGDGHPEMKAIDRLATRAEKLMSGDGHPEMKAIKTMNEVFVLELPLQVEKYQEDILDKRYEQLRQLYNYVQGKLLRQYRYFEQMKEFQACKTFKEKRDFFRAHPFHINGVYGNNNELFDITFDEYGVNGFVSKMAKKQVGANMTYADLGITTTLLDRLSLAIWASWEKMLYDYHARRISFKKHGELNIFGSRKKTNGSGKKVFSGMELNLERMEVSIKLNGKVGKKAKYIILPILHNPKHVDYEMMALKGGYDSVKVITVVRRLIRGRYKYYLQMSIEGEKPKKGRTLGKGNVGIDIGPTTVAVSGENIAYIDKLASKCDSIEAEKAKLGRKIDRSRRANNPQNFNENGTIKRGVRLVWTDSKRYKALRREMTELQRRQAAIRKQQHIDRANELLKEGDTFIVENNQVSGWTRKAKETKVNEKTGKILKKKRYGKSVANHAPSMFVTILENKVKSLGGQVVKVDIQNSASQYDFTNDTFKKHELKERSVTLSNGNTHQRDMLAAFNLQHLKYDAPEKKQYNREKMALHYDHFCKLEQEEILRYKNKEKKDDRSTIGAEKL

SEQ ID NO: 2875 - protein, 524 aa, unidentified
  REGION 1..524: note = Description of Unknown: uncultivated organism sequence
  REGION 1..524: note = Category: MG91 effectors
  REGION 1..524: note = Description: MG91-66 effector
MNEVFVLELPLLVERYQADILNKRYEQLRQLYNYVQGKLLRQYRYFEQMKEYKACEKIKEKRDFFRAHPFHINGVLNGNKKQLDITFDKNGINGFVEKLAQKSAGPTITYADLGFTTYILDHLSASIWAAWEKKLYDFKAKRISFKKYGELDSFSSRRKVVGGKVYFSGMELHLDTMKLSIKMNGKQGDNAKFITLKMLHNPKHADYEMWALKGGVDSVKVVKVVRRLVRSQYKYYVQLTIEGEKPQKGRKLGNGNVGIDLGPTTVAVSGENVVSIDKLASKCDNIQEEITRLSRKIDRSRRANNPQNFNEDGTIKRGIKLVWNDSKRYKELRRELAELRRKQAAIRKQQHIERANALLKEGDTFIVENNQISGWTTRAKETKVNEKTGKIQKKKRFGKSVANHAPSMFVSILENKVKSLGGEVVKVDTKNAASQYDFTDNSFTKHELKERNVTLSNGDTHQRDMLAAFNLQHLKYDEAEAKQYDTEAMAANYERFCQLEQEEIQRYKNKEKKDDRSTIGAEEL

SEQ ID NO: 2876 - protein, 605 aa, unidentified
  REGION 1..605: note = Description of Unknown: uncultivated organism sequence
  REGION 1..605: note = Category: MG91 effectors
  REGION 1..605: note = Description: MG91-67 effector
MIEEFVLTLPLKVESWQADILNKRYEHLRRIYNTVQRRLLRNYIYLSQQKVYRQLKDNDEKRAFWEHHPITFKDFCDRNGNPAIVKFPYTYSRRSKNSGKKASNGISDFVPKFKNRNIGSGLTYGSLGINASILEELGLRIQQAWEKRIYDSKSKRISFKEEGDLNTFGCRNKKGFSGFVLDLTHMMLSLNINGRQHQLAQYIHIPINPNKEFTEYEMYALKDGLSSVRKIIVSRVYIRGRYKYYVQLTIKGEKPQKNRTLGKGSVGIDVGPSTVAISSLKGVTLDKLADKCDDIEHDLWRINRKMDRSKRATNPDFFNKDGTYIKRKKGERRKWHFSNRYNRLKLERLELYRKQATIRKQQHIDIANALLSQGDDFIVENNPIDSWAKRAKETKRGKNGKIRCKRRFGKSVAHHAPAMFVSILQNKVHSLGGSFRKVEIKNAATQFDFTNGEFTKHELNERTVTLSDGRTHQRDMLSAFNLQHLRPESEEIKDYDIEQMEVDYPIFCKLEEQGIAIFKEKRPQDRDVAYFVGTSHKTLKISSANRHNGGVGRKNCNHHAGKRKNVAKAVTKSSSKKNCESLESVSIVPNEYHHSDNQHLRLDRL

SEQ ID NO: 2877 - protein, 614 aa, unidentified
  REGION 1..614: note = Description of Unknown: uncultivated organism sequence
  REGION 1..614: note = Category: MG91 effectors
  REGION 1..614: note = Description: MG91-68 effector
MPKEEFVLTLPLRVEKRHADILDKRYELLRQMYNMVQQKLVRQYIYFSQQKAYKACENFEQKRKFFNAHPFHFKGIKRKNGELSDIKFPYTYESRSSWSGKRPSGGISDYVSKLWSHKLGADKRLVDFGLNGSIMEELGLHVMKAWYDRLYKFKTKRVSFKDYGEINSFGCRLNKGNFAGFTINLEEGFITFNTNGRQGRFADIITLPIDFSREKRGYAAEALKDGVDSLRKLVIVRRCIRGRNKYYLQLTISGEKPEKGRTLGKGNVGIDIGPSTIATSSLQGVHFDKLADKCDNIEHELYIVNRKMARSRYENNRKYYNEDRTFKPREKGEIRRWKESNRFKQLKLVRRELYRKQAEIRKQQHLEMANAMLSQGDTFIVENNPIDAWVRRAKETTKTKTGKYRSKKRYGKSVANHAPAMFVTILENKVKSLGGEFHRIDPGYAATQFDFTNGVFTKHEVSERSITLSNGRTHQRDMLSAFNLQHARLDGEKEKSRDKEKKVESYDIAQMQADYPIFCRLETVEQERFKDARRNERDALYFVGAFAKELRHEPQEETVANRHNGGVGRKHCNTLCTENAKITGGLVRESIERVSEAPEECHHVGNQPIILDGL

SEQ ID NO: 2878 - protein, 510 aa, unidentified
  REGION 1..510: note = Description of Unknown: uncultivated organism sequence
  REGION 1..510: note = Category: MG91 effectors
  REGION 1..510: note = Description: MG91-69 effector
MFVVELPLKVEKWQSDVLNKRYELIAKIYNYAQKKLLRQYIYLTQMDEYKKCKTKKEKSNFFKNHPFYFKDITSKITFSEYDVTAFVEKIIKKNVSSDKTYKDFGINTSITECLGKHIWSAWEKKIYDKGKKISFKNKGELNTISIRKKSEYFGGLDVDIEHMILSFNINGKIKAKAKKIILPINVKNLTEYEMYALQGGYDSINVVTIIRKTIRGKYKYYVQFTIEGEKPQKGRTLGKGNVGIDIGPSTVAISSLNGVTIDTLAEKCDNIESKISDIGRKMDRSRRATNPQNFTEDGQIKRIDRKKGEKRVWKCSKRYVKLRNKKHELLRKQAVIRKLQHNIKANEILSLGDTFIVEDNPTSAWAKRAKGVRKNKNGKIQTNKRFGKSIANHAPSMFVTILQNKVDSLKGKFVKVDCKNAASRFDFTNGDFTGHNLDERKITLSNGNTHQRDMLAAFNLQHIDLTNDDLKKYNVDEMVEDYPIFCKLEKEEIGKFINGQKKSRSCTVGY

SEQ ID NO: 2879 - protein, 413 aa, unidentified
  REGION 1..413: note = Description of Unknown: uncultivated organism sequence
  REGION 1..413: note = Category: MG91 effectors
  REGION 1..413: note = Description: MG91-70 effector
MKENGFSQYGLDAFFKADTKGALYQCGLNSMFLQYLSQCAWSAWDKKLFGKGDFVKTDKVVNIFCSRNMKGRFCGFDYDLSTFTIRIKSTCTKKIICTIPFVVNKNSEYELYALSQKICRIGMVRKLIRSKYKYYVQFTFDGVPYNKGRNIGTGIVGIDPGPSKIAIVSDEKVEIAKLAPGIEEDERKTARLRRKLDRSRRATNPHMYKEDGTIIKGQRQTYFSKVYNETRKQLADAQRKLAAKRKIAHNELANTLLEYGDTFKVEANSYKSMQARAKATSMTKSGRIRSKKRYGKSIKNRAPSEFLVILKNKLLHYPNGKYYAVPASYACTQFDFTNESFTEHKISERRIVTSDSIQHNRDTLAAFNIKNAIVNDTSTKKKKVTKSKEFFDIVKMKASYNEFCVMERYLLSV

SEQ ID NO: 2880 - protein, 535 aa, unidentified
  REGION 1..535: note = Description of Unknown: uncultivated organism sequence
  REGION 1..535: note = Category: MG91 effectors
  REGION 1..535: note = Description: MG91-71 effector
MAQETFVLELPLKVEKWQADILDKRYEYLRQIYNYVQKKLIRQYKYFEQMNEFRQCTTYREKREFFRSHPFYYNEVVGRNGEPFAIKFPYSMSESNGAKLDGFNGYISKLGKLPAGANKTYADLGINSFMLERLASNMWSAWNKFLYDRDAKRVAFKKYGELNTFGSRKKNNISFIGMTIHLDTMELVIKTNGRTGRFAEYITLPIGAGKPLTEYEMYALKGGFDSIKILNVVRKQIRGNNKYYLQMTIEGEKPQKGRTLGVGCVGIDLGPSTIAVSSLQKVSIDKLANKCDDIQRDLNRVSRKMDRSRRANNPQNFNEDGTIKPVSRKNGERRVWNDSKRYRKLREERRELLRKQAAIRKAQHIETANALLPLGDTFIVENNPVSSWTRKSKETKINKKGKIQSKKRFGKSVANHAPSMFATILQNKVESLGGEFRKVEVKNAASRFDFTNGEFTEHGLGERVIALSNGDKHQRDLLAAFNLQHLNADGDTTKDYDVATMQEDYPTFCRLEREEMDLYLQGKKKNERTTIGAFK

SEQ ID NO: 2881 - protein, 524 aa, unidentified
  REGION 1..524: note = Description of Unknown: uncultivated organism sequence
  REGION 1..524: note = Category: MG91 effectors
  REGION 1..524: note = Description: MG91-72 effector
MKEVFVLDLPLRVEKYQSDILNKRFEQLRQLYNYVQGKLLRQYRYFEQMKEYQACKTFKEKKDFFRNHPFHINGILGSNKELLDITFDEYGIKGFVEKLVQKGVGTDMTYADLGFTTYILDHLSAGIWSAWDKMLYDYKARRISFKKYGELDSFSSRRKVVQGKVYFSGMELHLDSMMLSVKMNGKVGKAAKFITLPILHNPKHADYEMWALKGGLDSIKVVKVVRRMVRGRYKYYLQMSIEGEKPLKGRKLGKGNVGIDLGPTTVAVSGENIASIDKLASKCDSIETEKAKLGRKIDRSRRANNPQNFNEDGTIKRGIRLEWNDSKRYKELRVEMAELQRRQAAIRKQQHIDRANELLKEGDTFIVENNQISGWTRKAKETKVNENTGKIRKKKRFGKSVANHAPAMFMTILENKVKSLGGKVVKVDTQNAASQYDFTNNSFTKHELNERSVTLSNGDTHQRDMLAAFNLQHLKYDEQEKKQYDTEAMTKHYGRFCELEQAEILRYKNKEKVDDRSTIGAKEL

SEQ ID NO: 2882 - protein, 527 aa, unidentified
  REGION 1..527: note = Description of Unknown: uncultivated organism sequence
  REGION 1..527: note = Category: MG91 effectors
  REGION 1..527: note = Description: MG91-73 effector
MNEVFVLELPLQVEKYQADILDKRYEQLRQLYNYVQGKLFRQYRYFEQMKEYQACEKINEKKDFFRTHPFLINETLKGIKTPFMVSFDEYSIKGFIEKLAQKQVGPNMTFADLGFTTYILDHLGASVWAAWDKKLYDFKAKRISFKKYGELDSFSSRRKVVRGVVYFSGMELHLDTMELAIKMNGKVGKEAKFITLKMLHNPKHADYEMWALKGGVEIVKVVKVVRRLVRSQYKYYVQLTIEGEKPQKGRTLGKGNVGIDLGPTTVAVCGENVVSIDKLASKCDNIQEKITRLSRKIDRSRRANNPQNFNEDGTIKRGIKLVWKKDKDLKRYSKLKRELVELRRKQTAIRKQQHIDRANALLKEGDTFIVENNQISSWTMRAKETKVNEKTGRIQKKKRFGKSVANHAPSMFINILENKVKSLGGKVVKVDTKNAASQYDFTDGSFTKHELKERNVTLSNGDTHQRDMLAAFNLQHLKYDEAEAKQYDTEAMAADYERFCQLEQEEIQRYKNKEKKDDRGTIGAEKL

SEQ ID NO: 2883 - protein, 193 aa, unidentified
  REGION 1..193: note = Description of Unknown: uncultivated organism sequence
  REGION 1..193: note = Category: MG91 effectors
  REGION 1..193: note = Description: MG91-74 effector
MRRELAELRRKQAAIRKLQHIERANALLKEGDTFIVENNQISSWTTRAKETKVNEKTGKIQKKKRFGKSIANHAPAMFVDILENKVKSLGGEVVKVDTKNAASQYDFTDNSFTKHELKERNVTLSNGDTHQRDMLAAFNLQHLKLDEAKTKQYDTEAMNADYDRFCQLEREEILRYKNKEKKDDKGTIGAEGL

SEQ ID NO: 2884 - protein, 538 aa, unidentified
  REGION 1..538: note = Description of Unknown: uncultivated organism sequence
  REGION 1..538: note = Category: MG91 effectors
  REGION 1..538: note = Description: MG91-75 effector
MMVIQKCRLFVIMKEVFVLEMPLLVEKYQEDILNKRFEQLRQLYNYVQGKLLRQYKYFEQMAEFQICKTSKAKREFIKTHPFHINGVIGRNKDLLDISFDEYGILGLVTKLGQKPLGSGKSYADMGISSTILANLSNNIWSAWNKKLYDYHAKRISFKRYGELNSFGSGKIVQKKDNDVKEYFPGFILHLERMELDIKTSKSGKNETCITLPILHNPKHADYEMWALKDGSTSIKVLTIVRRLVRGRYKYYLQMSIEGEKPQKGRTLGKGNVGIDIGPTTVAVSGENIASIDKLASKCDNIQEEITRLARKIDRSRRANNPQNFNEDGTIKRGVRLVWNDSKRYKALRKEMAELQRKQAAIRKQQHIDRANALLKEGDTFVVENNPIKGWQARAKETKIDEKTGRFKSKKGRGKSIGNHAPAMFVTILENKVKSLGGEVVKVDTHNAASQYDFTNESFTDHGYDRKITLSNGDTHQRDMLAAFNLQHLKYDETEKKQYDTEAMVQHYDRFCELEQEEILRYKNKEKKDDRSTIGAGDL

SEQ ID NO: 2885 - protein, 533 aa, unidentified
  REGION 1..533: note = Description of Unknown: uncultivated organism sequence
  REGION 1..533: note = Category: MG91 effectors
  REGION 1..533: note = Description: MG91-76 effector
MEEVFVLELPLRVEKYQSDILNKRYEQLRQLYNYVQGKLLRQYRYFEQMREFQDCKTFKEKRDFFRSHPFHINGIMGSNKELLDITFDEYGIQGFVSKLGKKLAGTNTSYADLGITSTILDRLSLAVWSSWEKMLYSLKTKRLAFKKYGELDSLSNRRIVAKGKVCFPGMELHLEKMELAIKLNSKTGKNAKFITLPILHNPKHADYEMWALKGGIDSIKVLTVVRRLVRGQYKYYLQMSIEGEKPQKGRTLGKGNVGIDLGPTTIAVSGENVVSIDKLASKCDNIQKEITRLARKIDRSRRANNPQNFNEDGTVKRGIKLVWNDSKRYKELRREMAELQRRQAAIRKQQHIDRANELLKEGDTFIVENNQISGWTRKAKETKVNEKTGKIQKKKRFGKSVANHAPAMFVTILENKVKSLGGEVVKVDTQNAASQYDFTNDSFEKHELKERSVTLSNGDTHQRDMLAAFNLQHLKYDDKEKKQYDTEAMKEHYERFCELEQEEIQRYKDKEKKDDRSTIGAEKLHMNDGTVKK

SEQ ID NO: 2886 - protein, 528 aa, unidentified
  REGION 1..528: note = Description of Unknown: uncultivated organism sequence
  REGION 1..528: note = Category: MG91 effectors
  REGION 1..528: note = Description: MG91-77 effector
MNEVFVLELPLQVEKYQADILNKRYEQLRQLYNYVQGKLLRQYKYFEQMKEYQSCRTFKEKKDFFRNHPFQIKGVLGRNKELLDIFFDEYGIFGLVTKLGQKPMGSGMSYTDMGISSTILANLSYNIWSSWNKKLYDYHADRISFKKHDGLNTFGSGKIVKKKDNEVKEYFPGMVLHLDRMEIDIKTNGGLGKKTTFIALPILYNPKHADYEMMALKGGTKSIKVLTVVRRLVRGQYKYYLQLTIEGEKPQKGRTLGKGNVGIDLGPTTVAISGKNVVSIDKLASKCDNIQEEITRLSRKIDRSRRANNPQNYNEDGTIKRGIKLVWNDSKRYKELRRELAELRRKQAAIRKQQHIDRANALLKEGDTFIVENNQISGWTTRAKETKVNENTGKIQKKKRFGKSVANHAPSMFVSILENKVKSLGGEVVKVDTKNAASQYDFTDGSFTKHELKERNVTLSNGDTHQRDMLAAFNLQHLKYDEAEAKQYDTEAMAADYERFCQLEQEEIQRYKNKEKKDDRGTIGAEKL

SEQ ID NO: 2887 - protein, 528 aa, unidentified
  REGION 1..528: note = Description of Unknown: uncultivated organism sequence
  REGION 1..528: note = Category: MG91 effectors
  REGION 1..528: note = Description: MG91-78 effector
MEEVFVLELPLLVEKYQADILNKRYEQLRQLYNYVQGKLLRQYRYFEQMTEFQVCKTFKEKRDFLRSHPFHINGILGSNKALLDITFDDYGINGFVTKLGLKSISNEKTYADIGINSSILAKLSNNIWSSWDKMLYDNKAKRISFKKYGEINSFGCGKKTNGSGKKVFSGMELRLEKMELAIKLNSKTGKNAKFITLPILHNPKHADYEMWALKGGYDSVKVITVVRRMVRGQYKYYLQMSIEGEKPQKGRTLGKGTVGIDIGPTTIAVSGENIVSIDKLAAKCDNIEAEIQRLARKIDRSRRANNPDNFNEDGTVKRGVRLVWKKDKDCKRYAALKREMAELHRRQAAIRKQQHIDRANELLKEGDTFIVENNQISGWVRRAKETKVSEKTGRIQKKKRFGKSVANHAPSMFVTILENKVKSLGGEVVKVDTQNAASQYDFTNNSFEKHELNERSVTLSDGKKHQRDMLAAFNLQHLKYGESEKKQYDTEAMNQHYERFCELEHEEIMRYKNKEKKDDRSTIGAGDC

SEQ ID NO: 2888 - protein, 528 aa, unidentified
  REGION 1..528: note = Description of Unknown: uncultivated organism sequence
  REGION 1..528: note = Category: MG91 effectors
  REGION 1..528: note = Description: MG91-79 effector
MNEVFVLELPLQIEKYQADALNKRYEQLRQLYNYVQGKLLRQYRYFEQMKEYQACKKIKEKRFFFRSHPFQINETLKGNKIPFKVSFDEYSIKGYIEKLVQKSVGPNMTYADLGFTTNILDHLGASVWAAWDKKLYDLKAKRISFKKYGELDSFSSRRKVVRGVVYFSGMELHLDSMELAIKMNGKVGKDAKFITLKMLHNPKHADYELWALKGGVDSVKVVKVVRRLVRSQYKYYVQLTIEGEKPQKGRTLGKGNVGIDLGPTTVAVSGVNVVSIDKLASKCDNIQEEITQLSRKIDRSRRANNPQNFNEDGTIKRGIKLVWSDSKRYKELRRELAELRRKQAVIRKQQHIERANALLKEGDTFIVENNPISSWTTRAKETKVNEKTGKIQKKKRFGKSVANHAPSMFVSILENKVKSLGGRFERVSTQNAASQYDFTTDTFKTGEEKHKLNERAITLSNGDTHQRDMLAAFNLQHLKYDEKDAKQYDTEAMAADYERFCQLEQEEILRYKNKVKKDDRGTIGAEKL

SEQ ID NO: 2889 - protein, 521 aa, unidentified
  REGION 1..521: note = Description of Unknown: uncultivated organism sequence
  REGION 1..521: note = Category: MG91 effectors
  REGION 1..521: note = Description: MG91-80 effector
MNEVFVLELPLQVEKYQADILNKRYEQLRQLYNYVQGKLLRQYKYFEQMKEYQACKAFKEKKDFFRSHPFQINETLKGNETALKVSFDEYSIKGYIEKLVQKSVGQNMNYADLGFTTNILDHLGASIWAAWDKKLYDFKAKRISFKKYGELDSFSSRRKVVGGKVYFSGMELYLDTMELAIKMNGKVGKEAKFITLKMLHNPKHADYEMWALKGGVESVKVVKVVRRLVRSQYKYYVQLTIEGEKPQKGRTLGKGNVGIDLGPTTVAVSGENIVSIDKLASKCDNIQEEITRLSRKIDRSRRANNPQNFNEDGTIKRGIKLVWNDSKRYKELRRELAELRRKQAAIRKQQHIDRANALLKEGDTFIVENNQISGWTTRAKETKVSEKTGKIQKKKRFGKSVANHAPSMFVSILENKVNSLGGQVVKVDTQNAASQYDFTDGSFTKHELKERNVTLSNGDVHQRDMLAAFNLQHLTGEKRQYDVEAMKRDYERFCQLEQEEIQRYKNKEKKDDRGTIGAEKL

SEQ ID NO: 2890 - protein, 605 aa, unidentified
  REGION 1..605: note = Description of Unknown: uncultivated organism sequence
  REGION 1..605: note = Category: MG91 effectors
  REGION 1..605: note = Description: MG91-81 effector
MVEEFVLTLPLKVEPWQADILNNRYEHLRRMYNMVQRKLLRHYIYLSQQKAYRQCKDNDEKRTFWENQPITFKDLCDKNGNPAIVRFPHTYYTRSKASGKRTSNGIPDLLPKFKNRNIGSGLTYASLGINAAILENLGLRIEQAWKKRLYDPKSKHISFKDEGDLNTFGCREKDGFSGFVLDLPRMMLSFNINGKQKSQAKFIHLPINAGKELTEYEMYALKGGLDSIRKIIIAREYVRGRYKYYVQLTIKGEKPQKNRTLGNGSVGIDVGPSTVAISSLQGVTLDKLADKCDDIEHDLWRINRKMDRSKRKTNPDFFNDDKTYKKRKRGERRIWHFSKRYKRLKLERRELYRKQAAIRKQQHIDMANALLSQGDEFIVENNPIDSWAKCAKETKKNKNGKNRCKRRFGKSIAHHAPAMFISILHNKVRSLGGSFSKVEIKNAATQFDFTNGEFTKHELNERIVTLSDGRTHQRDMLSAFNLQHLRPESEEIKDYDIEQMEVDYPIFCKLEEQGIAIFKEKRPQDRDVAYFVGTSHKTLKISSANRHNGGVGRKNCNHHAGKRKNVAKAVTKSSSKKNCESLESVSVVPNEYHHSDNQHLRLDRL

SEQ ID NO: 2891 - protein, 525 aa, unidentified
  REGION 1..525: note = Description of Unknown: uncultivated organism sequence
  REGION 1..525: note = Category: MG91 effectors
  REGION 1..525: note = Description: MG91-82 effector
MNNETFIMELPLIVEKFQSDELDKRFEILRRIYNMAQNKLERQFCYLSKFKEYQECTTKKAKGEFIKKHPFSFKDILDKSGNPLMITFTKYDIQGYLSKFAKLKIDSQYTYSDMGINTSMLMHMGMAIWSAWEKVIFDSKADKISYKKYGDLKSIGVDWEPKHPAGFILNLQKGELKLNLNNRQGQYARYITMKIRFGRKEHQVWYEGDALNAGEDSIRVLTIVRRKIRGRYNYYLQMTIRNNKPQKGRTLGEGRVAIDLGTSKIAVVAKDKVHLLPLSPSILSVSDELRIIQRQMDRSRRANNPQKYHEDGTVKKGNHDKWVNSKEYIRLRNMKAELERKQAAVRKQDHIALANYLLSLGNEFVIEDNDVQEWAKRKKEEKRRKSDGKNLSKAGLGKQIGNHAPSMFVTILKNKVESLGGTFVKVDNNNRATDYDFTNNTFNEHKLEERYITLGNGNRHQRDTLAAFNLYHLDTAPEKEKCYNLYEMRKHYAQFCEFEKEALLRWKGMTPKREKMKVREHERGL

SEQ ID NO: 2892 - protein, 490 aa, unidentified
  REGION 1..490: note = Description of Unknown: uncultivated organism sequence
  REGION 1..490: note = Category: MG91 effectors
  REGION 1..490: note = Description: MG91-83 effector
MARENENSGCFVVTFPLKTEKWQEDRIDKILTLLTVRYREKQKILLDRYIHLSHSPEFKEAKKTGLKAFRDFMNEHNFTKYDVEKVFSDSSLSKSVTADIMLTYGINSDIMQELSHRAWSAWEKKLYGQGKFIRLDNEVTLFKSRSHKGNVTGFEYSFTEMTLSMNATKPKKHTMFTIPFVVNRKSEYEAYALGCEVKNIAIMRQQIRGKNKYYVQFSFAGTPYNKGRKMGTGIVGIDPGPSKIAIVSDSEIRITTLAPSVTKDEKAVCRLQRKLDRSRRATNPDNYNDDGTIKRGIKLKFEKSNSYKRTQTKLADMQRKLAAKRKIDHNILANEIITMGNEFRVEKNSFKSMQVRSKETKKNDKGKNLSKKRWGDSLSNHAPAELLTILKNKVCQYADGEYVDIPSSVACTAFDFTNGEFTKHPPKERTITTSDGFVHDRDALAAFNMRFVHKKKIEGKKKIEKDKENFDILAMTEAYRQFCSLEKNIK

SEQ ID NO: 2893 - protein, 528 aa, unidentified
  REGION 1..528: note = Description of Unknown: uncultivated organism sequence
  REGION 1..528: note = Category: MG91 effectors
  REGION 1..528: note = Description: MG91-84 effector
MEEVFVLELPLQVEKYQADILNKRYEQLRQLYNYVQGKLLRQYRYFEQMTEFQVCKTFKEKRDFFRSHPFHINGILGSNKELLDITFDDYGINGFVTKLGLKSIGNGKTYTDIGINSAILEKLSDNIWASWDKMLYDYKAKRISFKRYGELNSFGCRKKLNGSRKKVFSGMELRLDKMELAIKLNSKTGKNAKFITLPILHNPKHADYEMWALKGGYDSVKVITVVRRMVRGQYKYYLQMSIEGEKPQKGRTLGKGTVGIDIGPTTIAVSGENIVSIDKLAAKCDNIEAEIQRLARKIDRSRRANNPDNFNEDGTVKRGVRLVWKKDKDCKRYAALKREMAELHRRQAAIRKQQHIDRANELLKEGDTFIVENNQISSWVRRAKETKVSEKTGRIQKKKRFGKSVANHAPSMFVTILENKVKSLGGEVVKVDTQNAASQYDFTNNSFEKHELNERSVTLSDGKKHQRDMLAAFNLQHLKYGESEKKRYDTEAMNQHYERFCELEHEEIMRYKNKEKKDDRSTIGAGDL

SEQ ID NO: 2894 - protein, 524 aa, unidentified
  REGION 1..524: note = Description of Unknown: uncultivated organism sequence
  REGION 1..524: note = Category: MG91 effectors
  REGION 1..524: note = Description: MG91-85 effector
MKEVFVLELPLRVEKFQEDILNKRYEQLRQLYNYVQGKLLRQYRYFEQMKEFQACTTLKDKRDFIRTHPFHIYGVYGKNGDLFDITFDEYGINGFVAKLGKKLVGTNTTYADLGITSTILDRLSLAIWASWEKMLYSFHTKRLSFKKYGELDSLSNRRIVVRGKVCFPGMELHLEKMELAIKLNSKTGKNAKFITLPILHNPKHADYEMWALKGGIDSIKVITVVRRLVRGQYKYYLQMSIEGEKPQKGRTLGKGNVGIDIGPTTVAVSGENIASIDKLASKCDNIQEEITRLARKIDRSRRANNPENFNEDGTIKRGVRLVWNDSKRYKALRKEMAELQRRQAAIRKQQHIDRANELLKEGDTFIVENNQISGWTRKAKETKVNEKTGKIQKKKRFGKSVANHAPSMFVTILENKVKSLGGEVIKVDTQNAASQYDFTNNSFEKHELKERSVTLSNGDTHQRDMLAAFNLQHLKYDAQEKKQYDTEAMAQHYERFCELEQAEIMRYKNKEKKDDRSTIGAGDL

SEQ ID NO: 2895 - protein, 524 aa, unidentified
  REGION 1..524: note = Description of Unknown: uncultivated organism sequence
  REGION 1..524: note = Category: MG91 effectors
  REGION 1..524: note = Description: MG91-86 effector
MNDVFVLELPLQVEKYQADILNKRYEQLRQLYNYVQGKLLRQYRYFEQMKEYQACKTIKEKRDFFKSHPFQVNESLGGDKSAFEISFNEFSIKGFIEKLVQKSVGANMTYADLGFTTNILDHLGASVWAAWDKKLYDFKAKRISFKKYGELDSFSSRRKVVGGKVYFSGMELHLDTMELAIKMNGKQGNNAKFITLKMQHNPKHAEYEMWALKGGVDSVKVVKVVRRLVRSQYKYYVQLTIEGEKPQKGRTLGMGNVGIDLGPTTVAVSGENVVSIDKLASKCDNIQEGITRLSRKIDRSRRANNPQNFNEDGTIKRGIKLVWNDSKRYKELRRELAELRRKQAAIRKQQHIERANALLKEGDTFIVENNQISGWTTRAKETKVNEKTGKIQKKKRFGKSVANHAPSMFVSILENKVKSLGGEVVKVDTKNAASQYDFTDNSFTKHELKERNVTLSNGDTHQRDMLAAFNLQHLKYDEKENKQYDKEGMKAHYERFCKLEQEEIQRYKNKEKKDDRGTIGAKKL

SEQ ID NO: 2896 - protein, 490 aa, unidentified
  REGION 1..490: note = Description of Unknown: uncultivated organism sequence
  REGION 1..490: note = Category: MG91 effectors
  REGION 1..490: note = Description: MG91-87 effector
MARENENSGCFVVTFPLKTEKWQEDRIDKILTLLTVRYREKQKILLDRYIHLSHSPEFKEAKNAGLKALRDFMNEHKFTKYDVEKVFSDSSLSKSVTTDIMLTYGINSDIMQELSHRAWSAWEKKLYGQGKFIRLDNEVTLFKSRSHKGNVTGFEYSFTEMTLSMNATKPKKHTMFTIPFVVNRKSEYEAYAMDCEVRNIAIMRQQIRGKNKYYVQFSFAGTPYNKGRKIGTGIVGIDPGPSKIAIVSDSEIRITTLAPSVNRDERAICRMQRKLDRSRRATNPDNYNDDGTIKRGIKLTFEKSNSYKRTQAKLADTQRKLAAKRKIDHNILANEIIAMGNEFHVENNSFKSMQARSKETKKNDKGKNMSKKRFGKSLANRAPSELLTILKNKVNQYADGDYVDIPSGVACTQFDFTNGEFTKHELKERTITTSDGVVHDRDALAAFNMRFVHKKKVEGKKKIEKDKENFDILAMTEAYRQFCSLEKNIK

SEQ ID NO: 2897 - protein, 527 aa, unidentified
  REGION 1..527: note = Description of Unknown: uncultivated organism sequence
  REGION 1..527: note = Category: MG91 effectors
  REGION 1..527: note = Description: MG91-88 effector
MNEVFVLELPLQVEKYQEDILERRFEQLRQLYNYVQGKLLRQYRYFEQTKEFQACKTIKEKRDFFRNHPFHFNGIYGNNNELFNITFDEYGVNGFVSKMAKKQVGANMTYADLGITTTLLDRLSLAIWASWEKKLYDYHTKRISFKKHGELNIFGSRKKTNGSGKKMFSGMELNLERMEVSIKLNGKVGKKAKYITLPILHNPKHVDYEMLALKGGFDSVKVITVVRRLVRGRYKYYLQMSIEGEKPKKDRTLGKGNVGIDIGPTTVAVSGENIASIDKLASKCDSIEVEKARLGRKIDRSRRANNPQNFNEDGTIKRGVRLVWNDSKRYKVLRREMTELQRRQAAIRKQQHIDRANELLKEGDTFIVENNQISGWTRKAKETKVNEKTGKIQKKKRFGKSVANHAPSMFVTILENKVKSLGGQVVKVDTKNAASQYDFTNDSFEKHELNERSVTLSNGDTHQRDMLAAFNLQHLKYDAQEKKQYDREAMTQHYDRFCKLERAEIMRYKNKEKRDDRSTIGAGELNT

SEQ ID NO: 2898 - protein, 528 aa, unidentified
  REGION 1..528: note = Description of Unknown: uncultivated organism sequence
  REGION 1..528: note = Category: MG91 effectors
  REGION 1..528: note = Description: MG91-89 effector
MNEVFVLELPLKVEKYQADILNKRYEQLRQLYNYVQGKLLRQYRYFEQMKEFQECKSFKSKREFIKAHPFQIKGVMARNKELLDIFFDEYGILGLVTKLGQKPIGSGKTYTDMGISSTILANLSDNIWSSWNKKMYDYHADRISFKKFGELNTFGSGKIVQKKDNEVKEYFPGMVLHLDKMEIDIKTNGALGKKATFITLPILHNPKHVDYEMMALAGGSRSIKVLTIVRRMVRGQYKYYVQLTIEGGKPQKGRTLGKGNVGIDLGPTTVAVSGENVVSIDKLASKCDNIQEEITRLSRKIDRSRRANNPQNFNEDGTIKRGIKLVWNDSKRYKELRRELAELRRKQAAIRKQQHIDRANALLKEGDTFIVENNQISGWTTRAKETKVNEKTGKIQKKKRFGKSVANHAPSMFVSILENKVKSLGGEVVKVDTKNAASQYDFTDGSFTKHELKERNVTLSNGDTHQRDMLAAFNLQHLKYDEKDTKQYDTESMAADYERFCQLEQEEIQRYKNKEKKDDRSTIGAEKL

SEQ ID NO: 2899 - protein, 579 aa, unidentified
  REGION 1..579: note = Description of Unknown: uncultivated organism sequence
  REGION 1..579: note = Category: MG91 effectors
  REGION 1..579: note = Description: MG91-90 effector
MIEEFVLTLPLKVEKWQADILNNRYEHLRHIYNMVQRKLLRQYIYYSQQTEYRNCKSNDERREFWGNHPFTIKGICDQKGNSPIVKFPYTYSSRSKGSGKRASNGISDLLPKLKHYNIGSGKTYGSLGLNASILENLGLSIQQAWEKRLYDKKSRHISFKKEDELNTFGCRFKRGFSGINLDLSKMILSLNINGRQHNLAKYINLSINPNKKFTEYEEYALKGGISSIKKIVILREYIRGRYKYYVQLTIEGEKPQKNRTLGVGTVGIDVGPSTVAVSSLYCVSFNKLADKCDDIEHDLWLVNRKMDRSKRATNPGFFAADGTYIKRKKGERRKWKFSHRYENLRSVRRELYRKQAVVRKQQHIAMANEMLSQGDTFIVENNPVDSWTRRAKETKKNKKGKMRCKRRFGKSVVHHAPAMFVSILENKVRSLGGTFHKADIKNAATQFDFTNGELKKHELKERTVTLSNGKTHQRDMLAAFNLQHLRVDSTKDKDYDVEQMILDYPVFCKLEEQETTSFIEAKGKDKDAAYFAGISSKETNRSSNRHNGGVERKHCNNHEEKGDAAKSGKKNFQEGFPRA

SEQ ID NO: 2900 - protein, 849 aa, unidentified
  REGION 1..849: note = Description of Unknown: uncultivated organism sequence
  REGION 1..849: note = Category: MG91 effectors
  REGION 1..849: note = Description: MG91-91 effector
MKEEDIIKFSDSLKGLGTNKKGVALILRNPIKITEDSAVQGVIIDNKPDRKEGIDRLDYIVYDRENGMHRSPATEGNFDQEVPYHILSRFEDLMDCGKLIPVVFEDSVNPFSTDITFKHNDPLKNDKKAFWNYPLDKEQFEASSSVRFYKSVLAPRNFSESNTFNCKTEEASLYFAVENARRLSKRGSAVRDFRNKDIWTVSLDNADESKPLDVETAEFFATKSIRSSILNMGDTKVFQALFDSKKNAIAFASDYANWMTKAEIAVGKLLGFNIPSNIQDQGMDLLGGDKKYIDCYLQKNFYTEEFQERPFGELLDNTLKWIREYGANPDEENIKAVSESLDKIAFDKYVVEGIHLDYFFQEPITLDDGRKIVGFGKNLGKDNVTWAAKAYTTNADNTAVEKVDFKDLPHDGLKKAIEKLDSPYHPHIDFGDKKLNVYKMDRVAYSLYQRISNVGAKSFTPSEASQAELFFKQLPEEIRQPMAVYLENLVRKNINEKEVSLPEKWFTSAFEELEKIAKDGLPIKYNLKHADYEMTALAGGIDSIKLLTVVRRLVRGKYKYYLQITIKGKKPQKGRELGSGKVGIDLGASTIAVCGDNIVSIDKLAAKCDYIQKDVKKIQRKMDRSRRANNPDNYNENGAIKKGKKLVWKNSNRYKALCKQYAEIKRKQAAVRKIEHIERANNLLKEGNIFITEKNPIKEWAKKSEETEINPKTGKTKSKKKYGKSISVHAPGMFIEILKNKVVSLGGKFIKDNPENAASEYDFTNDTFTDHGFDRTITLSNGDKHQRDTLAAFNIKNRKYDEEEPKQYNREQMQKEYARFCELEREEIEKYKNGTKKDYRRTIAAYKLY

SEQ ID NO: 2901 - protein, 607 aa, unidentified
  REGION 1..607: note = Description of Unknown: uncultivated organism sequence
  REGION 1..607: note = Category: MG91 effectors
  REGION 1..607: note = Description: MG91-92 effector
MAKEEFVLTLPLKVEKWQADILDKRYELLRQVYNMVQQKLVRQYIYFSQQKAYRDCKNFEQRRGFFEAHPFHVKSVKGKNGELCDIKFPYTYKSRGGSSGKRAPNGISDYVSKLWSHKIGQNKTLADFGINSYIMEELGLHIMKAWEDRLYKPKSKRVSFKDYGEINSFGSRNKNGNFAGFTINLDNGIITYKTNGRQGQFADLIQLPIDFSREKNGYASEALKGGIESLKKLLIVRRCIRGENKYYLQLTISGEKPQKGRTLGKGNVGIDIGPSTIATSSLNGVYFDKLADKCDNIEHELYLINRKLDRSRRANNPQNYNEDGQIKRGVRLVWKKDKDVKRYATLKLQRKELYRKQAEIRKLQHLEMANAMLSEGDTFIVENNPIDAWVRRTKETTKTKAGKNRCKKRYGKSVANHAPAMFVSILKNKVLSLGGKFYEIDPRNAATQFDFSNGEFTKHEVSERSITLSNGRTHQRDMLSAFNLQHIVLQNKELKEYDIEQMEADYPIFCRLENTELERFKEARHKERDALYFAGASEKQMRRQPQEESVANRHNGGVGRKHCNTSLGGGNAKITGNGLARESIERVSQVPDERHLSGCVPISLDGL

SEQ ID NO: 2902 - protein, 524 aa, unidentified
  REGION 1..524: note = Description of Unknown: uncultivated organism sequence
  REGION 1..524: note = Category: MG91 effectors
  REGION 1..524: note = Description: MG91-93 effector
MKEVFVLELPLQVEKYQADILNKRYEQLRQLHNYVQGKLLRQYRYFEQMKEFQACKTFKEKKDFFRNHPFHVNGIWGSNKELLDITFDEYGINGFVEKLVQKSVGSDMTYADLGFTTNILDHLSASIWRAWDKMLYDYHAKRVSFKKYGELDSFSSRRKVVGGKVYFSGMELHLDTMVLSIKLNGKQGKSAKFLTLPILHNPKHADYEIWALKGGLDSVKVVKVVRRMVRGNYKYYLQMSIEGEKPQKGRTLGKGNVGIDLGPTTVAVSGNNVVSIDKLAAKCDNIQAEIARLGRKIDRSRRANNPHNFNEDGTIKRGVRLVWNDSKRYKALRRDMAELQRRQAAIRKQQHIDRANALLKEGDTFIVENNQISGWTRKAKETKVNEKTGKIQKKKRFGKSVANHAPAMFVTVLENKVNSLGGKVVKVDTKNAASQYDFTNGSFEKHELKERNVTLSNGDTHQRDILAAFNLQHLKYDEKEKKQYDVESMKAHYERFCYLEQAEIMRYKNKEKKDDRSTIGAEKL

SEQ ID NO: 2903 - protein, 515 aa, unidentified
  REGION 1..515: note = Description of Unknown: uncultivated organism sequence
  REGION 1..515: note = Category: MG91 effectors
  REGION 1..515: note = Description: MG91-94 effector
MELPLQVEKYQEDILNKRYEQLRQLYNYAQGKLLRQFRYFEQMKDYQLCKTFKEKKDFFKNHPFQINGILGSNKQPLDITFDEYGINGFVEKLVQKSAGPNITYADLGITTTILDHLSSSIWRAWDKMLYDYHAKRVSFKKYGELDSFSSRRKVVGGKVYFSGLELHLDTMKLSVKLNGKQGSNAKFITMPILYNPKHEDYELWALKGGLESVKVVKVIRRLVRSQYKYYVQLTIEGEKPQKGRTLGKGNVGIDLGPTTVAVSGENIASIDKLASKCDNIQKEITRLARKIDRSRRANNPENFNEDGTIKRGVRLVWNDSKRYKALRKEMAELQRRQAAIRKQQHIDRANALLKEGDTFIVENNQISAWVRKAKETKVNEKTGKIQKKKRFGKSVANHAPAMFVTILENKVKSLGGEVVKVDTQNAASQYDFTNDSFEKHELNERSVTLSNGDTHQRDMLAAFNLQHLTAEKKQYDREAMAQHYDRFCELEQTEIERYKNKEKKDDRSTIGAGGL

SEQ ID NO: 2904 - protein, 413 aa, unidentified
  REGION 1..413: note = Description of Unknown: uncultivated organism sequence
  REGION 1..413: note = Category: MG91 effectors
  REGION 1..413: note = Description: MG91-95 effector
MKENGFSQYGLDAFFKADTKGALYQCGVNSMFLQYLSQCAWSAWDKKLFGKGDFVKTDKVVNIFCSRNKKERFCGFDYDLSTFTISIKSTCTKKIICTIPFVVNKKSDYELFALSQRICRIGIVRKLIRGKYKYYVQFTFDGVPYHKGRNIGTGIVGIDPGPSKIAIVGDNKVEIAKLAPNIEEDERKTARLKRKLDRSRRATNPHMYKEDGTIIKGQRQTCFSKVYNETRKQLADAQRKLAAKRKIAHNELANTLLEYGDTFKVEANSYKSMQARTKATSMTKSGRIRSKKRYGKSIKNRAPSEFLVILKNKLLHYPNGKYYAVPASYACTQFDFTNESFTEHKISERKIVTSDGVQHNRDTLAAFNIKNAIVNETSTKKKKITKSNEFFDIVRMKASYNEFCLMERYLLSI

SEQ ID NO: 2905 - protein, 527 aa, unidentified
  REGION 1..527: note = Description of Unknown: uncultivated organism sequence
  REGION 1..527: note = Category: MG91 effectors
  REGION 1..527: note = Description: MG91-96 effector
MNEVFVLELPLQVEKYQADILNKRYEQLRQLYNYVQCKLLRQYRYFEQMNEYQACEKIKEKRDFFRAHPFQINEKLKGKNTPITVSFDEYSIKGFIEKLAQKQVGPNKTYADLGFTTYILDHLGASVWAAWDKKLYDFKAKRISFKKYSELDSFSSRRKVVRGVVYFSGMELHLDTMELAIKMNGKVGKDAKFITLTMLHNPKHADYEMWALKGGVDSVKVVKVVRRLVRSQYKYYVQLTIEGEKPQKGRTLGKGNVGIDLGPTTVAVCGENIVSIDKLASKCDNIQSKITRLSRKIDRSRRANNPDNYNEDGTIKRGVKLVWEKEKNLKRYSKLKRELAELRRKQAAIRKLQHIERANALLNEGNTFIVENNPVKAWVRRAKETKVDEKTGKYKSKRGSGRSVGSHAPAMFVDIMENKVKSLGGRFERVDTQNAASRFDFTDGSFTEHDRSVRAVTLSNGDTHQRDMLAAFNLQHLQLDEAKTKQYDTEAMAADYERFCQLEQEEIQRYKNREKKDDRSTIGAEKL

SEQ ID NO: 2906 - protein, 484 aa, unidentified
  REGION 1..484: note = Description of Unknown: uncultivated organism sequence
  REGION 1..484: note = Category: MG91 effectors
  REGION 1..484: note = Description: MG91-97 effector
MAHKENQKAFVVTFPLRTEKWQEDRIDKMMRMLTTFYNDRQRKLVRRYIYLSHSKAYKEAKGKGVVAFKNYMKENGFSQYGLDAFFKADTKGALYQCGLNSMFLQYLSQCAWSAWDKKLFGKGDFVKTDKVVNIFCSRNKKERFCGFDYDLSTFTISIKSTCTKKIICTIPFVVNKNSEYELYALSQKICRIGIVRKLIRSKYKYYVQFTFDGVPYNKGRNIGTGIVGIDPGPSKIAIVGDNKVEIAKLAPNIEEDERKTARLKRKLDRSRRATNPHMYKEDGTNIKGQRQICFSKSYNETRKQLADAQRKLAAKRKIAHNELANTLLEYGDTFKVEANSYKSMQARAKATSMTKSGRIRSKKRYGKSIKNRAPSEFLVILKNKLLYYPKGKYYDVPSSYACTQFDFTNESFTEHKISERRIVTSDGIQHNRDTLAAFNIKNAIVNDTSTKKKKVTKSKEFFDIVKMKASYNEFCLMERYLLSV

SEQ ID NO: 2907 - protein, 525 aa, unidentified
  REGION 1..525: note = Description of Unknown: uncultivated organism sequence
  REGION 1..525: note = Category: MG91 effectors
  REGION 1..525: note = Description: MG91-98 effector
MNEVFVLELPLQVEKFQVDILNKRYEQLRQLYNYVQGKLLRQYRYFEQMKEYQACKTFKEKKDFFRSHPFQINETLKGNETAFKVSFDEYSINSYIEKLVQKSVGSNMTYSDLGFTTNILDHLSASIWAAWNKKLYDFKAKRISFKKYGELDSFSSRRKVVRGVVYFSGIELHLDTMELAIKMNGKVGKEAKFITLKMLHNPKHAEYEMWALKGGVDSVKVVKVVRRLVRSQYKYYVQLTIEGEKPQKGRTLGRGNVGIDLGPTTVAVSGENVVSIDKLASKCDNIQEEITRLSRKIDRSRRANNPQNFNEDGTIKRGIKLVWNDSNRYKELRRELAELRRKQAAIRKQQHIDRANSLLKEGDTFIVENNQISSWTTRAKETKVNEKAGKIQKKKRFGKSVANHAPSMFVSILENKVKSLGGEVVKVDTKNAASQYDFTDGSFTKHELKERNVTLSNGDTHQRDMLAAFNLQHLKYEEKDKTKQYDTDAMKKDYERFCQLEQEEIQRYKNKEKKDDSSTIGAGEL

SEQ ID NO: 2908 - protein, 535 aa, unidentified
  REGION 1..535: note = Description of Unknown: uncultivated organism sequence
  REGION 1..535: note = Category: MG91 effectors
  REGION 1..535: note = Description: MG91-99 effector
MAQETFVLELPLKVEKWQADILDKRYEYLRQIYNYVQKKLIRQYKYFEQMNEFRQCTTYRDKREFFRNHPFYYNEVVGRNGEPFAIKFPYSMSESNGAKLDGFNGYISKLGKLPVGANKTYADLGINSFMLERLASNMWSAWNKFLYDRDAKRVAFKKYGELNTFGSRKKNNISFIGMAIHLDTMELVIKTNGRNGQFAEYITLPIGTGKPLTEYEMYALKSGFDSIKILNVVRKQIRGNNKYYLQMTIEGEKPQKGRTLGEGCVGIDLGPSTIAVSSLQKVSIDKLANKCDDIQRDLNRVSRKMERTRRANNPHYINEDGTIKPISRKSGERRVWHDSKRYKKLREERKELLRKQAAIRKAQHIETANALLPLGDTFIVENNPVSSWTRKSKETKINKKGKIQSKKRFGKSVANHAPSMFATILQNKVESLGGQFRKVEVKNAASRFDFTNGEFTEHGLGERVIALSNGDKHQRDLLAAFNLQHLNADGNSTKDYDVATMQKDYPTFCRLEREEMDLYLQGKKKNERTTIGAFK

SEQ ID NO: 2909 - protein, 528 aa, unidentified
  REGION 1..528: note = Description of Unknown: uncultivated organism sequence
  REGION 1..528: note = Category: MG91 effectors
  REGION 1..528: note = Description: MG91-100 effector
MKEVFVLELPLRVEKYQADILNKRYELLRQLYNYVQGKLLRQYRYFEQMKDYQICKTFKDKREFIKAHSFHINGVLGRNKELLDISFDEYGIMGLVTKLGQKLIGSGKTYTDMGISSTILANLSDNIWSSWNKKLYDYHADRITFKKYGSLNTFGSGKIVQKKDNEVKEYFPGMVLHLERMEIEIKTNGGLGKKATFITLPILHNPKHADYEMMALAGGSSSIKVLTIVRRLVRGQYKYYLQMSIEGEKPQKGRMLGKGNVGIDLGPTTVAVSGENIACIDKLASKCDNIQAEITKLARKIDRSRRANNPQNYNEDGTIKRGIKLVWYDSKRYKELRRELAELRRKQAAIRKQQHIDRANALLKEGDTFIVENNQISGWTTRAKETKVNEKTGKIQKKKRFGKSVANHAPSMFVTILENKVKSLGGQVVKVDTQNAASQYDFTNDSFTKHELKERNVTLANGDTHQRDMLAAFNLQHLKYDAKEKKQYDKEAMKAHYEHFCELEQEEIQRYKNKEKKDDRSTIGAEKL

SEQ ID NO: 2910 - protein, 509 aa, unidentified
  REGION 1..509: note = Description of Unknown: uncultivated organism sequence
  REGION 1..509: note = Category: MG91 effectors
  REGION 1..509: note = Description: MG91-101 effector
MRKKTTDENFIMELPLTVDKFQSDELYKRFELMRRIYNSAQNKLKRQYEYLSSFKAYKECKTKKEKGDFLKAHPFSFRGVLDKDGEPLKITFSEYDLKSYLSKFAKQKVDSQYTYSDFGINTSMLMHMAMAIWSAWKKVLYDPKAQEVSFKKHGELQSIGVDWEPKHPAGLILDLQKGELKVNLNNRQGQYARYITMKIKFGHKEHQIWYEGDALNAGEDSIRGLTIVRRKIRGKYNYFLQMTIRNNKPQKGRTLGTGRVAIDLGTCKIAVVTKNSVRLIPLAPSISSYSDELRIIQRQMDRSRRANNPQKYHEDGTIKKGNHDKWISSKEYIRLRDIKAELERKQAAVRKQDHIALANYLLSLGNEFVIEDNDVQEWAKRKKEEKKREKDGKNLSKAGLGKQIGNHAPAMFVTILKNKVESLGGSFIKVDTDNGATDYDFTNDEFTHHELEERYITLSDGKRHQRDTLAAFNLYHINTVQNRVYDRLAMQRHYAWFCEKEAESVEQYK

SEQ ID NO: 2911 - protein, 525 aa, unidentified
  REGION 1..525: note = Description of Unknown: uncultivated organism sequence
  REGION 1..525: note = Category: MG91 effectors
  REGION 1..525: note = Description: MG91-102 effector
MNEVFVLELPLMVEKYQADILNKRYEQLRQLYNYVQGKLLRQYRYFEQMADYQVCKTIREKRDFLKNHPFNINGVLDRRGKLLDITFDEYGIQGFVEKMIHKSVGNNISYADLGLNTLILDYLAASIWRAWDKKLYDLNAKRISFKKHGELDSFSSRRKVVNGTARFFGLELYLDKMELAVKVNGKQGKNAKFITLKIQHNPKHVDYEMWALKGGVDSVKVVKVVRRLVRSQYKYYVQLTIEGEKPQKGRTLGKGNVGIDLGPTTVAVSGKNVVSIDKLASKCDNIQEEITRLSRKIDRSRRANNLQNFNEDGTIKRGIKLVWNDSKRYKELRRELAELRRKQAAIRKQQHIDRANALLKEGDTFIVENNPVKAWAARAKETKVNEKTGKIQSKKRGGKSIGNHAPAMFVDILENKVKSLGGTFIRANTNNAASQYDFSNNSFKEGEDRHGLNERAITLSNGNTHQRDMLAAFNLQHLTDEKKQYDVEAMKRDYERFCQLEQEEIQRYKNKEKKDDRSTIGAEKL

SEQ ID NO: 2912 - protein, 524 aa, unidentified
  REGION 1..524: note = Description of Unknown: uncultivated organism sequence
  REGION 1..524: note = Category: MG91 effectors
  REGION 1..524: note = Description: MG91-103 effector
MNEVFVLELPLLVERYQADILNKRYEQLRQLYNYVQGKLLRQYRYFEQMKEYKACEKIKEKRDFFRAHPFHINGVLNGNKEQLDITFDKNGINGFVEKLAQKSAGPNITYADLGFTTYILDHLSASIWAAWEKKLYDFKAKRISFKKYGELDSFSSRRKVVGGKVYFSGMELHLDTMKLSIKMNGKQGDNAKFITLKMLHNPKHTDYEMWALKGGVDSVKVVKVVRRLVRSQYKYYVQLTIEGEKPQKGRKLGKGNVGIDLGPTTVAVSGENVVSIDKLASKCDNIQEEITRLSRKIDRSRRANNPQNFNEDGTIKHGIKLVWNDSKRYKELRRELAELRRKQAAIRKLQHIERANTLLKEGDTFIVENNQISGWATRAKETKVNEKTGKIQKKKRFGKSVANHAPSMFINILENKVKSLGGEVVKVDTKNAASQYDFTDGSFTKHELKERNVTLSNGDTHQRDMLAAFNLQHLKYDEAEAKQYDTEAMAADYERFCQLEQEEIQRYKNKEKKDDRGTIGAEKL

SEQ ID NO: 2913 - protein, 484 aa, unidentified
  REGION 1..484: note = Description of Unknown: uncultivated organism sequence
  REGION 1..484: note = Category: MG91 effectors
  REGION 1..484: note = Description: MG91-104 effector
MAHKENQKAFVVTFPLHTEKWQEDRIDKMMRMLTTFYNDRQRKLVRRYIYLSHSKAYKEAKGKGVVAFKNYMKENGFSQYGLDAFFKADTKGALYQCGLNSMFLQYLSQCAWSAWDKKLFGKGDFVKTDKVVNIFCSRNKKERFCGFDYDLSTFTISIKSTCTKNIICTIPFVVNKKSDYELYALSQKICRIGIVRKLIRSKYKYYVQFTFDGVPYNKGRNIGTGIVGIDPGPSKIAIVGDNKVEIAKLAPNIEEDERKTARLKRKLDRSRRATNPHMYKEDGTNIKGQRQICFSKSYNETRKQLADAQRKLAAKRKIAHNELANTLLEYGDTFKVEANSYKSMQARAKSTSMTKSGRIRSKKRYGKSIKNRAPSEFLVILKNKLLYYPKGKYYDVPSSYACTQFDFTNESFTEHKISERRIVTSDGIQRNRDTLAAFNIKNAIVNDTSTKKKKVTKSKEFFDIVKMKASYNEFCVMERYLLSV

SEQ ID NO: 2914 - protein, 524 aa, unidentified
  REGION 1..524: note = Description of Unknown: uncultivated organism sequence
  REGION 1..524: note = Category: MG91 effectors
  REGION 1..524: note = Description: MG91-105 effector
MEEVFVLELPLQVEKYQADILNKRYEQLRQLYNYVQGKLLRQYRYFEQMAEFQACKTIREKRDFFRSHPFHINGKLAGNKELPEITFDEYGINGFVEKMAQKSVGTNMTYADLGFTTYILDHLSASIWTAWEKKLYDYRATRISFKKYGELDSFSSRRKVVRGKAYFSGVELHLDSMELAIKLNGKVGKNAKFITLPILHNPKHADYEMWALKGGLDSVKVVKVVRRLVRGQYKYYVQLSIEGEKPQKGRTLGKGNVGIDIGPTTVAVSGENIASIDKLASKCDNIQEEITRLARKIDRSRRANNPENFNEDGTIKRGVRLVWNDSKRYKALRKEMAELQRRQAAIRKQQHIDRANALLKEGDTFIVENNQISGWTRKAKETKVNEKTGKIQKKKRFGKSVANHAPAMFVTILENKVKSLGGKVIKVDTQNAASQYDFTNNSFEKHELKERSVTLSNGDTHQRDMLAAFNLQHLKYDKAEKKQYDTEAMAQHYERFCELEQEEIMRYKKKEKKSDRSTIGAEEL

SEQ ID NO: 2915 - protein, 526 aa, unidentified
  REGION 1..526: note = Description of Unknown: uncultivated organism sequence
  REGION 1..526: note = Category: MG91 effectors
  REGION 1..526: note = Description: MG91-106 effector
MKEVFVLEMPLLVEKYQEDILNKRFEQLRQLYNYVQGKLLRQYKYFEQMAEFQICKTSKAKREFIKTHPFHINGVIGRNKDLLDISFDEYGILGLVTKLGQKPLGSGKSYADMGISSTILANLSNNIWSAWNKKLYDYHAKRISFKRYGELNSFGSGKIVQKKDNDVKEYFPGFILHLERMELDIKTSKSGKNETCITLPILHNPKHADYEMWALKDGSTSIKVLTIVRRLVRGRYKYYLQMSIEGEKPQKGRTLGKGNVGIDIGPTTVAVSGENIASIDKLASKCDNIQEEITRLARKIDRSRRANNPQNFNEDGTIKRGVRLVWNDSKRYKALRKEMAELQRKQAAIRKQQHIDRANALLKEGDTFVVENNPIKGWQARAKETKIDEKTGRFKSKKGRGKSIGNHAPAMFVTILENKVKSLGGEVVKVDTHNAASQYDFTNESFTDHGYDRKITLSNGDTHQRDMLAAFNLQHLKYDETEKKQYDTEAMVQHYDRFCELEQEEILRYKNKEKKDDRSTIGAGDL

SEQ ID NO: 2916 - protein, 483 aa, unidentified
  REGION 1..483: note = Description of Unknown: uncultivated organism sequence
  REGION 1..483: note = Category: MG91 effectors
  REGION 1..483: note = Description: MG91-107 effector
MAHKENQKAFVVTFPLRTERWQEDRIDKMMKMLTTYYNDRQKKLVGRYIYLSHSKAFKEAKGKGVVAFKKYMQENGFSKYDLDAFFKANTKGAIYQIGLNSNNIQYLSQCAWSAWERKLFGNGKFIKTDIDVNIFKSRRKNDSFAGFAYDIGSFTITIKSTYARNNICTIPFIVNRKSEYELFAMSQEIRNIAIVRKVIRGVNKYYVQFTVEGAPYNKGRHLGTGTVGIDPGPSKMAIVADKVVEINKLAPNIEEDEKVTARLKRKLDRSRRATNPHMYNEDGTSKKGQRQTIFSKSYDKTRKQLAEAQRKLTAKRKIAHNELANKILEYGDTFKVETNSFKSMQARSKTTSTTKNGRIRSKKRYGKSIKNRAPSEFLLILKNKLLQYSSGKYYDVPASYACTQFDFTDESFTEHKVSERSIITSDGIQHNRDTLAAFNIKNAIVSDTTSKKRKIVKSKEFFDINVMKETYRAFCEMESKLLA

SEQ ID NO: 2917 - protein, 528 aa, unidentified
  REGION 1..528: note = Description of Unknown: uncultivated organism sequence
  REGION 1..528: note = Category: MG91 effectors
  REGION 1..528: note = Description: MG91-108 effector
MNEVFVLELPLLVEKYQADILNKRYEQLRQLYNYVQGKLLRQYKYFEQMKEYQACEKIKEKRDFFRTHPFQINETLKGNKIPFKVSFDEYSIKGYIEKLAQKQIGSNMTYADLGFTTNIFDHLGASVWAAWDKKLYDFKAKRISFKKYGDLDSFSSRRKIVRGVVYFSGMELHLDTMELAIKMNGKVGKEAKFITLRMLHNPKHADYEMWALKGGVESVKVVKVVRRMVRSQYKYYVQLTIEGEKPQKGRTLGKGNVGIDLGPTTVAVSGENVVSIDKLASKCDNIQEEITRLSRKIDRSRRANNPQNFNEDGTIKRGIKLVWNDSKRYIELCRELAELRRKQAAIRKQQHIDRANALLKEGDTFIVENNPVNAWVRRAKETKVDEKTGKYKSKRGSGRSVGNHAPAMFVDILENKVKSLGGRFERVNTQNAASQYDFTIDSFKTGDDKHKLNERAITLSNGDTHQRDMLAAFNLQHLKYDEAEAKQYDTEAMAADYERFCQLEQEEIQRYKNKEKKDDRSTIGAEKL

SEQ ID NO: 2918 - protein, 524 aa, unidentified
  REGION 1..524: note = Description of Unknown: uncultivated organism sequence
  REGION 1..524: note = Category: MG91 effectors
  REGION 1..524: note = Description: MG91-109 effector
MMKEVFVLELPLLVEKYQADILNKRYEQLRQLYNYVQGKLLRQYRYFEQMVEFQACKTIREKRDFFRSHPFHVNGRLAGDKELPEITFDEYGIKGFVEKLAQKSVGPNMTYADLGFTTYILDHLGANIWSAWDKKLYDYRAKRISFKKFGELDSFSSRRKVVGGKVYFSGMELRLDTMELAIKLNAKQGKNAKFVTLRILHNPKHADYEMWALNGGLDSIKVVKVVRRLVRGQYKYYVQLSIEGEKPQKGRTLGKGNVGIDIGPTTVAVSGENIASIDKLASKCDNIQEEITRLARKIDRSRRANNPENFNEDGTVKRGVRLVWKDSKRYKELRKEMAELQRRQAAIRKQQHIDRANALLKEGDTFIVENNPIKGWAARKKETKIDEKTGKYKSKKGRGKSIKNHAPAMFVTILENKVKSLGGKVERVDTQNAASRFDFTDGSFTDHGYDRKVTLSNGDTHQRDMLAAFNLQHLKYDEAEKKQYDTKAMAQHYDRFCELEQEEIQRYKNKEKKDDRSTIGAGEL

SEQ ID NO: 2919 - protein, 383 aa, unidentified
  REGION 1..383: note = Description of Unknown: uncultivated organism sequence
  REGION 1..383: note = Category: MG91 effectors
  REGION 1..383: note = Description: MG91-110 effector
MFLQYLSQCAWSAWDKKLFGKGDFVKTDKVVNIFCSRNKKERFCGFDYDLSTFTISIKSTCTKKIICTIPFVVNKKSDYELFALSQRICRIGIVRKLIRGKYKYYVQFTFDGVPYHKGRNIGTGIVGIDPGPSKIAIVGDNKVEIAKLAPNIEEDERKTARLKRKLDRSRRATNPHMYKEDGTIIKGQRQTCFSKVYNETRKQLADAQRKLAAKRKIAHNELANTLLEYGDTFKVEANSYKSMQARTKATSMTKSGRIRSKKRYGKSIKNRAPSEFLVILKNKLLHYPNGKYYAVPASYACTQFDFTNESFTEHKISERKIVTSDGVQHNRDTLAAFNIKNAIVNETSTKKKKITKSNEFFDIVRMKASYNEFCLMERYLLSI

SEQ ID NO: 2920 - protein, 533 aa, unidentified
  REGION 1..533: note = Description of Unknown: uncultivated organism sequence
  REGION 1..533: note = Category: MG91 effectors
  REGION 1..533: note = Description: MG91-111 effector
MKAIEIMKEVFVLELPLQVEKYQADILNKRYEQLRQLYNYVQGKLLRQYRYFEQMLEFQACKTIREKRDFFRSYPFHINGIVGRNKELLDLSFSEYGILGLVTKLGQKPVGSGKTYADVGISSTILANLSNNIWSAWNKKLYDLHAKKISFKKYGELNTFGSGKIVQKKENEVKEFFPGMVLHLERMEIDIKTSKSGKNETYITLPILPNPKHADYEMWALKGGSSSIKVLTIVRRRVRGLYKYYLQMSIEGEKPQKGRTLGKGNVGIDIGPTTVAVSGENIASIDKLASKCDNIQEEITRLARKIDRSRRANNPENFNEDGTIKRGVRLVWKDSKRYKALRKEMAELQRRQAAIRKQQHIDRANALLKEGDTFIVENNQISGWTRKARETKVNEKTGKIQKKKRFGKSVANHAPAMFVTILENKVKSLGGEVVKVDTQNAASQYDFTNNSFEKHELKERSVTLSNGDTHQRDMLAAFNLQHLKYDEAEKKQYDREAMTQHYERFCELEQAEIQRYKNKEKKDDRSTIGAGDL

SEQ ID NO: 2921 - protein, 605 aa, unidentified
  REGION 1..605: note = Description of Unknown: uncultivated organism sequence
  REGION 1..605: note = Category: MG91 effectors
  REGION 1..605: note = Description: MG91-112 effector
MIEEFVLTLPLKVETWQADILNNRYEHLRCIYNMVQRKLLRHYIYLSQQNEYRQCKDNDEKRTFWENHPITFKDFCDKNGNPAIVKFPYTYSHRSKDSGKKASNGISDFVPKFKNRNIGGGLTYGSLGINASILENLGLRIEQAWKKRLYDPKSKHISFKEEGDLNTFGCREKDGFSGFVLDLQKMTLSFNTNGRQGKSAKFIHFPINAGKELTEYEMYALKGGIGSIRKIVVSREYVRGRYKYYVQLTIKEEKPQKNRTLGKGTVGLDVGPSTVAVSSLHGVSLDKLADKCDNIEHDLWRINRKMDRSKRDTNPDFFNEDKTYKKPEKGERRKWTFSNRYKRLKLERRELYRKQAAIRKQQHIEMVNALLSQGDEFIVENNPIDSWAKRAKETKRGKNGKIRCKRRFGKSVAHHAPAMFVSILQNKVRSLGGTFHKVEIKNAATQFDFTNGEFTKHELNERTVTLSNGRTHQRDMLSAFNLQHLRPDSEETKDYNIEQMEADYPVFCKLEEKGIAQFKEKRQQERDVAYFTGVSHKTLKFSSANRHNGGVGRKNCNHHAGSKRNVAETGNKSSSKENCESMETVSLVPNEYHHSNHQHLRLDGL

SEQ ID NO: 2922 - protein, 528 aa, unidentified
  REGION 1..528: note = Description of Unknown: uncultivated organism sequence
  REGION 1..528: note = Category: MG91 effectors
  REGION 1..528: note = Description: MG91-113 effector
MNEVFVLELPLQVEKYQADILNKRYEQLRQLYNYVQGKLLRQYRYFEQMKEYQACEKFREKKDFFKSHPFHINETLKGNKTPIKVSFDEYSIKGYIEKLAQKPVGPNMTYADIGFTTYILDHLGASIWSAWDKKLYDFKAKRISFKKYGELDSFSSRRKVGRGVIYFSGMELHLDTMELAIKMNGKVGKGAKFITLKILHNPKHADYEMWALKGGLESIKVVKVVRRLVRSQYKYYVQLTIEGEKPQKGRTLGKGHVGIDLGPTTVAISSENVVSIDKLASKCDNIQNEITKLGRKINRSRRASNPQNFNEDGTIKRGIKLVWNDSKRYKELRRELAELHRKQAAIRKLQHIERANALLKEGDTFIVENNPVNAWSRRSNETKVDEKTGKFKSKRGSGRSIGNHAPSMFVDILENKVKSLGGRFERVNTQNAASQYDFTTDSFKTGDEKHKLNERAITLSNGDTHQRDMLAAFNLQHLKLDEEKPKQYDTEAMAADYNRFCQLEHEEIMRYKNKEKKDDNSTIAAGKL

SEQ ID NO: 2923 - protein, 525 aa, unidentified
  REGION 1..525: note = Description of Unknown: uncultivated organism sequence
  REGION 1..525: note = Category: MG91 effectors
  REGION 1..525: note = Description: MG91-114 effector
MKEVFVLELPLQVEKYQEDILNKRYEQLRLLYNYVQRKLLRQYRYFEQMDDFQACKTFKEKRDFFKSHPFHINGIIGSNKELLDITFDDYGINGFVTKLGSKSISDENTYSDMGINSAILAKLSDNIWSSWDKMLYDHKAKRISFKRYGDLNSFGCGKKTNGSGKKVFSGLELHLETMTLAIKLNSKVGKSAKFITLPILHNPKHADYEMMALKGGIDSVKVVKVVRRMVRGRYKYYLQMTIEGEKPKKGRLLGKGNVGIDLGPTTVAVSGESIASIDKLASKCDNIQEEITRLARKIDRSRRANNPENYNEDGTIKCGVHLAWNNSKRYKALRREMAELRRKQAAIRKHQHIDRANALLKEGDTFIVENNQISGWTRKAKETKVNEKTGRIQKKKRFGKSVANHAPAMFVTILENKVKSLGGEVVKVDTQNAASQYDFTNDSFEKHELKERNVTLSNGDTHQRDMLAAFNLQHLKYDEAEKKQYDREAMAQHYERFCELEQEEIMRYKNKVKKDDRSTIGTGNL

SEQ ID NO: 2924 - protein, 528 aa, unidentified
  REGION 1..528: note = Description of Unknown: uncultivated organism sequence
  REGION 1..528: note = Category: MG91 effectors
  REGION 1..528: note = Description: MG91-115 effector
MNEVFVLELPLQVEKYQADILNKRYEQLRQLYNYVQGKLLRQYRYFEQMKEYQACKTIKEKRDFFKSHPFQVNESLGGDKSAFEISFNEFSIKGFIEKLVQKSVGANMTYADLGFTTNILDHLGASVWAAWDKKLYDFKAKRISFKKYGELDSFSSRRKVVGGKVYFSGMELHLDTMELAIKMNCKQGNNAKFITLKMQHNPKHAEYEMWALKGGVDSVKVVKVVRRLVRSQYKYYVQLTIEGEKPQKGRTLGMGNVGIDLGPTTVAVSGENVVSIDKLASKCDNIQEEITRLSRKIDRSRRANNPQNFNEDGTIKRGIKLVWNDSKRYKELRRELAELRRKQAAIRKQQHIDRANALLKEGDTFIVENNQISSWTTRAKETKVNEKTGKIQKKKRFGKSVANHAPSMFVSILENKVKSLGGEVVKVDTKNAASQYDFTDGSFTKHELKERNVTLSNGDTHQRDMLAAFNLQHLKYDEKDTKQYDTEAMTADYERFCQLEQEEIQRYKNKEKKDDKGTIGAEKYESKV

SEQ ID NO: 2925 - protein, 525 aa, unidentified
  REGION 1..525: note = Description of Unknown: uncultivated organism sequence
  REGION 1..525: note = Category: MG91 effectors
  REGION 1..525: note = Description: MG91-116 effector
MENEIFVLEMPLKVEKWQADILNKRYEYLRQIYNYVQGKLLRQFRYFEQMEEYQQCKTFKDKRTFISNHPFHIKGINDKSGNPQPITFTKLSISCFAEKLAKRQIGKDKTYLDVGINTNIIKEQTFNLWKSWEKYLYDYSAHRVAFKKKDELNIFRYGKKGDGFNGMAVNLEKMEVTIKTNGRQGNNATFLTLSVDCGKGMTEYELFALKGDIASINTVAIIRRNIRGQFKYYVQFNIEGEKPQKGRTLGVGKVGIDIGPSTIAVASLNNVSIDKLADRCDDIQHDLNIVSRKIDRSRRANNPQNFNADGTIKRISRQKGERRVWNDSNRYKKLKAERAELLRKQAAIRKNQHILKANELLEMGDTFIVENNPVDGWTRRTKETKFDKRGKIQSKKRYGKSVANHAPSMFVTILENKVKSFGGTFVRADVKNAASQFDFTSGEFTKHEVGERTVTLANGDKHQRDMMAAFNLQHLNIESEELKDYDIEQMKSDYPNFCSQEREELNRYIRKEKKDERTTIGAFRK

SEQ ID NO: 2926 - protein, 606 aa, unidentified
  REGION 1..606: note = Description of Unknown: uncultivated organism sequence
  REGION 1..606: note = Category: MG91 effectors
  REGION 1..606: note = Description: MG91-117 effector
MAKETFVLTLPLKVEKWQADILDKRYELLRQIYNMVQQKLLRQYIYFSQQKAFKACKGDFQKMREFFASHPFHFKGIKGRNGEPSDIKFPYTYESRSSSSGRRAPNGISDFVSKLGAHKIGKDKTLSDFGINSCILEELGLHVMQAWEKRIYESKSSRVSFKKYGDINSFGSRCKNGSFAGFTFNLEKSHITFNTNGRQRKCAKLITLPIDFSREKKGYAASALKGGIDSLRKLIIVRKCIRGKNKYYLQLTIGGEKPQKGRTLGHGNVGIDVGPSTIAVSSLQCVHFNKLADKCDNIEHDLFLVNRKLDRSRRANNPQNYNADGTVKRGVRLVWKKDKDVKRYASLKLHRKELYRKQAEIRKQQHLQMANAILSEGDTFIVENNPIDAWVRRAKETTKTKTGKNRCKKRYGKSVANHAPAMFVSILKNKVQSLGGVFHEVDVRYAATQFDFTNGTKTKHEVSERSITLSNGHTHQRDMLSAFNLQHIKLECIGTEDKDYDIKQMQADYPIFCKLEAAEQERFKVARHNERDALYFVGASEKQLRHQPQDESVANRHNGGVGRKHCNTRLGSENAEITGSGLIRESIERVPQVSDEYHISGHPPIV

SEQ ID NO: 2927 - protein, 609 aa, unidentified
  REGION 1..609: note = Description of Unknown: uncultivated organism sequence
  REGION 1..609: note = Category: MG91 effectors
  REGION 1..609: note = Description: MG91-118 effector
MAKETFVLSLPLIVEKWQADILDKRYELLRQTYNMVQQKLLRQYIYFAQQKTFKACENFQQKRDFFASHPFHFKGIKGRNGELSDIKFPYTYESRSSSSGKRPSGGISDYVSKLWAHRISQDKTLADFGINGSILEELGLHIMKAWETRLYEPKASRVSFKDYGTVNSFGCRYHKGNFAGFTINLEEGYITYNTNGRRGSLANIIKLPIDYSREKKGYASEALKGGVDSLRKLVIVRKIIRGRNKYYLQLTISGEKPQKGRILGHGNVGIDIGPSTIATSSLQGVHFDKLADKCDNIEHELYLVNRKLDRSRRANNPQNYNEDGTIKRGIRLVWKKDKDAKRYASLKLLRKELYRRQAEIRKLQHLEMANAMLSQGDTFIVENNPIDAWVRRTKETAKTKTGRNRCKKRYGKSVANHAPAMFVSILKNKVLSLGGQFHEVDVRYAATQFDFTNGVKTKHEVGERSITLSNGRTHQRDMLSAFNLQHITLESIGTEDKDYNIEQMYADYPIFCKLESAEQERFKVARKNERDALYFVGVSEKNLRHQHHKETVVNRHNGDVGRKHCNNSLEKENAKITGNGLIRESIERVSEVPDKYHLVGNHPIVLDGL

SEQ ID NO: 2928 - protein, 550 aa, unidentified
  REGION 1..550: note = Description of Unknown: uncultivated organism sequence
  REGION 1..550: note = Category: MG91 effectors
  REGION 1..550: note = Description: MG91-119 effector
MTRTRTTLDNSYVALITPKDEGYLKKMNEVFVLELPLQVEKYQADILNKRYEQLRQLHNYVQDKLLRQYRYFEQMKEYQACEKIKEKREFFRAHPFQINETLKGNKTSFKVSFDEYRIKGYIEKLAQKQVGLNTTYADLGFTTYILDHLGASVWAAWDKKLYDFKAKRISFKKFGELDSFSSRRKVVGGKVYFSGMELHLDTMELAIKMNGKVGKEAKFITLKMLHNPKHADYEMWALKDGVDSVKVVKVVRRLVRSQYKYYVQLTIEGEKPQKGRTLGKGHVGIDLGPTTVAVSGENIVSIDKLASKCDNIQEEITRLSRKIDRSRRANNPQNFNEDGTIKRGIKLVWNDSKRYKELRRELAELRRKQAAIRKQQHIERANALLKEGDTFIVENNQISGWTTRAKETKVNEKTGKIQKKKRFGKSVANHAPSMFVSILENKVKSLGGEVVKVDTKNAASQYDFTDGSFTKHELKERNVTLSNGDTHQRDMLAAFNLQHLKYNEAEAKQYDTEAMAADYERFCQLEQEEIQRYKNKEKKDDKGTIGAEKF

SEQ ID NO: 2929 - protein, 524 aa, unidentified
  REGION 1..524: note = Description of Unknown: uncultivated organism sequence
  REGION 1..524: note = Category: MG91 effectors
  REGION 1..524: note = Description: MG91-120 effector
MNEVFVLELPLQVEKYQADILNKRYEQLRQLYNYVQGKLLRQYRYFEQMKEYQACKTIREKRDFFRSHPFLINETLKGNKTPFTVSFDEYSIKGFVEKLAQKPVGPNMTYADLGFTTPILDHLGASIWAAWDKKLYDFKAKRISFKKYGELDSFSSRRKVVRGVVYFSGMELHLDTMELAIKMNGKVGKEAKFISLKMLHNPKHADYEMWALKGGVDSVKVVKVVRRLLRNQYKYYVQLTIEGEKPQKGRTLGKGNVGIDLGPTTVAVSGKNVVSIDKLASKVDNFQEEITRLSRKIDRSRRANNPQNFNEDGTIKRGIKLVWNDSKRYKELRRELAGLRRKQAAIRKQQHIERANALLKEGDTFIVENNQISGWTTRAKETKVNEKTGKIQKKKRFGKSVANHAPSMFVSILENKVKSLGGDLVKVDTKNAASQYVFTDNSFSKHELKERNVTLSNGDTHQRDMLAAFNLQHLKYDEKDTKQYDTAAMTADYERFCQLEQEEIQRYKNKEKKDDRSTIGAEDL

SEQ ID NO: 2930 - protein, 529 aa, unidentified
  REGION 1..529: note = Description of Unknown: uncultivated organism sequence
  REGION 1..529: note = Category: MG91 effectors
  REGION 1..529: note = Description: MG91-121 effector
MNEVFVLELPLQVEKYQADILNKRYEQLRQLYNYVQGKLLRQYKYFEQMKEFQACKTFKEKKDFFRSHPFHIDGILGSNKELYDITFDEYGINGFVGKLGKKQVSAGVTYADLGITSTLLDRLSLAVWAAWDKMLYDYHSRRVSFKKNGELNIFGSRKKTNGSGKKMFSGMELHLEKMEVAIKLNGKVGKAAKFITLPILHNPKHIDYEMWALKGGFDSVTVLTIVRRMVRSQYKYYVQLTVEGEKPQKGRTLGKGNVGIDLGPTTVAVSGEHIVSIDKLASKCDNIQEEITRLSRKIDRSRRANNPQNFNEDGTIKRGIKLIWNHSKRYKELRRELAELRRKQAAIRKLQHIDRANALLKEGDTFIVENNQISGWTTRAKETKVSEKTGKIQKKKRFGKSVANHAPSMFVSILENKVKSLGGEVVKVDTKNAASQYDFTNNSFKKHELKERNVTLSNGNTHQRDMLAAFNLQHLKYNEPEAKQYDTEAMAADYKRFCQLEQEEIQRYKNKEKKDDRSTIGAEELNIKE

SEQ ID NO: 2931 - protein, 528 aa, unidentified
  REGION 1..528: note = Description of Unknown: uncultivated organism sequence
  REGION 1..528: note = Category: MG91 effectors
  REGION 1..528: note = Description: MG91-122 effector
MNEVFVLELPLQVEKYQADILNKRYEQLRQLYNYVQGKLLRQYKYFEQMKEYQSCRTFKEKKDFFRNHPFQIKGVLGRNKELLDIFFDEYGIFGLVTKLGQKPMGSGMSYTDMGISSTILANLSYNIWSSWNKKLYDYHADRISFKKHDGLNTFGSGKIVKKKDNEVKEYFPGMVLHLDRMEIDIKTNGGLGKKTTFITLPILYNPKHADYEMMALKGGTKSIKVLTVVRRLVRGQYKYYLQLTIEGEKPQKGRTLGKGNVGIDLGPTTVAISGKNVVSIDKLVSKCDNIQEEITRLSRKIDRSRRANNPQNYNEDGTIKRGIKLVWNDSKRYKELRRELAELRRKQAAIRKQQHIDRANALLKEGDTFIVENNQISGWATRAKETKVNEKTGKIQKKKRFGKSVANHAPSMFINILENKVKSLGGEVVKVDTKNAASQYDFTDGSFTKHELKERNVTLSNGDTHQRDMLAAFNLQHLKYDEAEAKQYDTEAMAADYERFCQLEQEEIQRYKNKEKKDDRGTIGAEKL

SEQ ID NO: 2932 - protein, 484 aa, unidentified
  REGION 1..484: note = Description of Unknown: uncultivated organism sequence
  REGION 1..484: note = Category: MG91 effectors
  REGION 1..484: note = Description: MG91-123 effector
MAHKENQKAFVVTFPLRTEKWQEDRIDKMMRMLTTFYNDRQRKLVRRYIYLSHSKAYKEAKGKGVVAFKNYMKENGFSQYGLDAFFKADTKGALYQCGLNSMFLQYLSQCAWSAWDKKLFGKGDFVKTDKVVNIFCSRNKKERFCGFDYDLSTFTISIKSTCTKKIICTIPFVVNKKSDYELFALSQRICRIGIVRKLIRGKYKYYVQFTFDGVPYHKGRNIGTGIVGIDPGPSKIAIVGDNKVEIAKLAPNIEEDERKTARLKRKLDRSRRATNPHMYKEDGTIIKGQRQTCFSKVYNETRKQLADAQRKLAAKRKIAHNELANTLLEYGDTFKVEANSYKSMQARAKATSMTKSGRIRSKKRYGKSIKNRAPSEFLVILKNKLLYYPKGKYYDVPSSYACTQFDFTNESFTEHKISERRIVTSDGIQHNRDTLAAFNIKNAIVNDTSTKKKKVTKSKEFFDIVRMKASYNEFCLMERYLLSV

SEQ ID NO: 2933 - protein, 524 aa, unidentified
  REGION 1..524: note = Description of Unknown: uncultivated organism sequence
  REGION 1..524: note = Category: MG91 effectors
  REGION 1..524: note = Description: MG91-124 effector
MKEVFVLDLPLRVEKYQSDILNKRFEQLRQLYNYVQGKLLRQYRYFEQMKEYQACKTFKEKKDFFRKHPFHINGILGSNKELLDITFDEYGIKGFVEKLVQKGVGTDMTYADLGFTTYILDHLSAGIWSAWDKMLYDYKARRISFKKYGELDSFSSRRKVVQGKVYFSGMELHLDSMMLSVKMNGKVGKAAKFITLPILHNPKHANYEMWALRGGLDSVKVVKVVRRLIRGQYKYYVQMTIEGEKPQKGRTLGKGNVGIDLGPTTVAVSSENIVSIDKLASKCDSIEAEKAKLGRKIDRSRRANNPQNFNEDGTIKRGVRLVWNDSKRYKALRGEMAELQRRQSAIRKQQHIDRANELLKEGDIFIVENNQISGWTRKTKETRVDESTGRIRKKKRFGKSVANHAPSMFVNILENKVKSLGGQLVKVDTQNAASQYDFTDGSFTKHELQERNVTLSNGDTHQRDMLAAFNLQHLKYDEAEKKQYDREAMSKHYERFCELEQAEILRYKNKEKVDDRSTIGAKEL

SEQ ID NO: 2934 - protein, 527 aa, unidentified
  REGION 1..527: note = Description of Unknown: uncultivated organism sequence
  REGION 1..527: note = Category: MG91 effectors
  REGION 1..527: note = Description: MG91-125 effector
MEEVFVLELPLQVEKYQADILNKRYEQLRQLYNYVQGKLLRQYKYFEQMKEYEVCKSIREKRDFFRNHPFHITGVLDKSGEPLDITFDEYGIQGFVEKIIHKSVGANTTYADLGFNTLILDYLSASIWSAWDKKLYDFKAKRISFKKYGELDSFSSRRKVVRGVVYFSGMELHLDTMELAIKMNGKVGKEAKFITLKMLHNPKHADYEMWALKGGVDSVKVVKVVRRLVRSQYKYYVQLTIEGEKPQKGRTLGKGNVGIDLGPTTVAISGKNVVSIDKLASKCDNIQEEITRLSRKIDRSRRANNPQNFNEDGTIKRGVKLVWNDSKRYKELRRELAELRRKQAAIRKQQHIDRANALLKEGDTFIVENNQISGWTTRAKETKVNEKTGKIQKKKRFGKSVANHAPSMFVSILENKVKSLGGEVVKVDTKNAASQYDFTDGSFTKHELKERNVTLSNGNTHQRDMLAAFNLQHLKYDEAEAKQYDTDAMAADYERFCQLEQEEIQRYKNKEKKDDRGTIGVEQLLKT

SEQ ID NO: 2935 - protein, 603 aa, unidentified
  REGION 1..603: note = Description of Unknown: uncultivated organism sequence
  REGION 1..603: note = Category: MG91 effectors
  REGION 1..603: note = Description: MG91-126 effector
MAKENFVLTLPLRVEKRHADILDKRYELLRQMYNMVQQKLVRQYIYFSQQKAYKACENFEQKREFFNTHPFHFKGIKGKNGELCDIKFPYTYESRSSSSGKRPSGGISDYVSKLWSHKVGADKKLVDFGLNGSIMEELGLHVMKAWEDRLYKFKARRVSFKDYGEINSFGCRYHKGNFAGFTINLEEGFITFNANGRRGQFAEIITLPIDFSREKKGYAEEALKGGVDSLRKLIIVRRCIRGRNKYYLQLTISGEKPKKGRTLGMGNVGIDVGPSTIAISSLQGVHFDKLADKCDNIEHKLYLINRKLDRSRRANNPDNYNPDGTIKRGVRLVWKKDKDVKRYASLKQQRKELFRKQAEIRKQQHLEMANAMLSQGDTFIVENNPIDAWVRRAKETKKTKTGKNRCKKRYGKSVANHAPAMFVSILKNKVLSLGGEFREVNPGYAATQFDFTNGVFTKHEVSERSITLSNGRTHQRDMLSAFNLQHICNELKEYNITQMQADYPIFCRLETAEQERFKEARRNERDALYFVGAFAKELRHSPQEETVANRHNGGVGRKHSNTLCTENAKITGSGLVRESIERVSEAPEECYHFDCQPIILDGL

SEQ ID NO: 2936 - protein, 528 aa, unidentified
  REGION 1..528: note = Description of Unknown: uncultivated organism sequence
  REGION 1..528: note = Category: MG91 effectors
  REGION 1..528: note = Description: MG91-127 effector
MKEIFVLELPLQVEKYQADILNKRYEQLRQLYNYVQGKLLRQYRYFEQMKEFQICKTIKERKDFFRSHPFHINGVLNSNKELLDITFDEYGINGFVSKLGKKQVCTDTTYADLGITSTLLDRLSLAVWAAWDKMLYDYHAKRISFKKYGELNVFGSRKKTNGSGKKVFSGMELHLEKMEVAIKLNGKVGKAAKFITLPILHNPKHAEYEMWALKDGYDSVTVLTIVRRMVRRHYKYYVQLTIEGEKPQKGRTLGKGNVGIDLGPTTVAVSGKNIVSIDKLASKCDNIQAEITRLSRKIDRSRRANNPQNFNEDGTIKRGVKLVWKKEKDLKRYSKLKRELAELRRKQAAIRKQQHIERANELLKEGDTFIVENNPVKAWVRRAKETKVDEKTGKIRSKRGSGRSVGNHAPAMFVDILENKVKSLGGRFERVETQNAASRFDFTNESFTEHDRSVRAITLSNGDTHQRDMLAAFNLQHLKLEDTKTKQYDIEAMAADYDRFCQLEREEIMRYKNKKKKDDRSTIGAEKL

SEQ ID NO: 2937 - protein, 516 aa, unidentified
  REGION 1..516: note = Description of Unknown: uncultivated organism sequence
  REGION 1..516: note = Category: MG91 effectors
  REGION 1..516: note = Description: MG91-128 effector
MEKKKEMFVVELPLKVEKWQSDVLNKRYELITKIYNYAQKKLLRQYIYLTQMDDYKKCKTKKDKSVFFKNHPFYFKGITSKITFSEYDVTAFFEKIIKKNVSSDKTYKDFGINTSITGYLGKHAWSAWEKKIYGTGKKISFKNKGELSTISIRKKSEYFGGLDVDIEHMILSFNINGKTKSKAKKIILPINTKNLTEYEMYALKGGYDSIKVVTIVSKMIRGKYKYYVQFTIEGEKPQKGRTLGKGNVGIDIGPSTVAISSLNGVTIDTLAEKCDNIEDKISDIERKLDRSRRATNPQNFTEDGQIKRIDRKKGEKRKWEYSKRYVKLNNKKRELLRKQAAIRKLQHNIKANEVLSLGDTFIVENNPTSAWAKRAKGVRKNKNGKIQTNKRFGKSIGNHAPAMFVTILQNKVESLKGKFVKVDIKNAASRFDFTNGDFTEHNLDERKITLSNGNTHQRDMLAAFNLQHIDLTNDDLKKYNVEEMMEDYPIFCKLEKEEIKRFTNGMKIPNKSNIGI

SEQ ID NO: 2938 - protein, 527 aa, unidentified
  REGION 1..527: note = Description of Unknown: uncultivated organism sequence
  REGION 1..527: note = Category: MG91 effectors
  REGION 1..527: note = Description: MG91-129 effector
MTEVFVLELPLQIEKYQADLLNKRYEQLRQLYNYVQGKLLRQYRYFEQMKEYQACKTIKEKRDFFRSHPFQINETLKGNKTLFTVSFEEYSIKGFVEKLAQKPVGSNMTYADLGFTTYILDHLGASIWAAWDKKLYDFKAKRISFKKYGELDSFSSRRKVVRGVVYFSGMELHLDTMELAIKMNGKVGKEAKFITLKILHNPKHAEYEMWALKGGVDSVKVVKVVRRLVRSQYKYYVQLTIEGEKPQKGRTLGKGNVGIDLGPTTVAVSGMNIVSIDKLASKCDNIQPKITRLSRKLDRSRRANNPDNYNEDGTIKRGVKLVWKKEKDLKRYSKLKRELAELRRKQAAIRKQQHIDRANELLKEGDTFIVENNQISGWTTRAKETKVNEKTGKIQKKKRFGKSVANHAPSMFVSILENKVKSLGGEVVKVDTKNAASQYDFTNNSFTKHELKERNVTLSNGDTHQRDMLAAFNLQHLKLDEAKTKQYDTEAMAADYVRFCQLEQKEIQRYKNKEKKDDRGTIGAEKL

SEQ ID NO: 2939 - protein, 524 aa, unidentified
  REGION 1..524: note = Description of Unknown: uncultivated organism sequence
  REGION 1..524: note = Category: MG91 effectors
  REGION 1..524: note = Description: MG91-130 effector
MNEVFVLELPLQVEKYQADILNKRFEQLRQLYNYAQGKLLRQYRYFEQMKEYQACKTFKDKKDFFKNHPFQIHGIQGSNKQPLDITFDEYGINGFVEKLVQKSAGPNVTYADLGFTTNILDHLSASIWRAWDKMLYDYHAKRVSFKKYGELDSFSSRRKVVSGKVYFSGMELHIDTMELSVKLNGKQGANAKFITMPIQYNPKHEDYELWALKGGLTSVKVVKVVRRLVRSQYKYYVQLTIEGEKPKKGRTLGKGNVGIDIGPTTVAVSGENIASIDKLASKCDNIQAEITRLGRKIDRSRRANNPQNFNEDGTIKRGVRLVWNDSKRYKALKREMVELQRRQAAIRKQQHIDRANALLKEGDTFIVENNQISGWTKRAKETKINEKTGKIQKKKRFGKSIANHAPSMFVTILENKVNSLGGKVVKVDTQNAASQYDFTDGSFEKHELNERSVTLSNGDTHQRDMLAAFNLQHLKYDEKEKKQYDVEAMKKHYERFCELEQDEIMRYKNKEKKDDRSTIGAEKF

SEQ ID NO: 2940 - protein, 609 aa, unidentified
  REGION 1..609: note = Description of Unknown: uncultivated organism sequence
  REGION 1..609: note = Category: MG91 effectors
  REGION 1..609: note = Description: MG91-131 effector
MAKENFVLTLPLKVEKCHADILDKRYELLRQTYNMVQRKLLRQYIYFAQQKEYKACENFQQRRDFFASHPFHFKGINSKNGEPADIKFPFTYESRSSNSGKRPSGGISDYVSKLWAHRVGADKTLANLGINSYILEELGLHIMKAWEKRLYDPKSSRVSFKDYGGVNSFGSRYKKGNFAGFTINLEEGFITYNANGRQGRFADLIKLPIDFSREKKDYAAYALKGGIDSLRKLIILRKNIRGRNKYYLQLTISGEKPQKGRALGQGNVGIDIGPSTIATSSLQGVHFDKLADKCDDIEHELYLINRKMARSRYENNRQNYNADKTIKRGVRLVWKKDKDVKRYASLKLKRRELYRRQAEIRKLQHLEMANAMLSQGDTFIVENNPIDAWVRRAKETTKTKTGRNRCKKRYGKSVANHAPAMFVTILKNKVESLGGKFYEVDVRYAATQFDFTNGVKTKHEVSERSITLSNGHIHQRDMLSAFNLQHIKLESIGTDDKEYNIEQMKADYPIFCQLETAEQQRFKEARHNERDAQYFVGAQEKQLRHQPQDESVANRHNGGVGRKHCNTRLEGENAKITGSGLVRESIERVSQVPDEYHPIGDQPIILDGL

SEQ ID NO: 2941 - protein, 615 aa, unidentified
  REGION 1..615: note = Description of Unknown: uncultivated organism sequence
  REGION 1..615: note = Category: MG91 effectors
  REGION 1..615: note = Description: MG91-132 effector
MAKENFVLTLPLRVNKCQADILDKRYELLRQMYNMVQQKLVRQYIYFSQQKAYKACENFEQKREFFNAHPFHFKGIKGKNGELCDIKFPYTYESRSSSSGKRAPSGISDYVSKLGSHKIGQDKTLADFGINSYIMEELGLHIMKAWEDRLYKFKSKRVSFKDYGEINSFGSRYKNGNFAGFTINLKEGFITYNTNGRRGQYADLITLPIDFSREKRGYAAEALKGGVDSLRKLVIVRRCIRGRNKYYLQLTISGEKPQKGRTLGKGNVGIDIGPSTIATSSLYGVHFDELADKCDNIEHELYLLNRKLDRSRRANNPDNYNPDGTIKRGVRLVWKKDKDVKRYASLKQLRKELFRKQAETRKQQHLEMANAMLSQGDTFIVENNPIDAWVRRAKETTKTKTGKNRSKKRYGKSVANHAPAMFVTILENKVKSLGGQFHRIDPGYAATQFDFTNGVFTKHEVSKRSITLSNGRTHQRDMLSAFNLQHARLEAEKAKSRDKEKKVESYDIVQMQADYPIFCRLETAEQERFKDARRNERDALYFVGAFAKKLRHEPQEETVANRHNGGVGRKHCNTLCTENAKITGSGLVRESIERVSEAPEECYHAGDQSIILDGL

SEQ ID NO: 2942 - protein, 524 aa, unidentified
  REGION 1..524: note = Description of Unknown: uncultivated organism sequence
  REGION 1..524: note = Category: MG91 effectors
  REGION 1..524: note = Description: MG91-133 effector
MKEVFVLDLPLRVEKYQSDILNKRFEQLRQLYNYVQGKLLRQYRYFEQMKEYQACKTFKEKKDFFRNHPFHINGILGSNKELLDITFDEYGIKGFVEKLVQKGVGTDMTYADLGFTTLILDHLSAGIWSAWDKMLYDYKARRISFKKYGELDSFSSRRKVVQGKVYFSGMELHLDSMMLSVKMNGKVGKAAKFITLPILHNPKHADYEMWALKGGLDSIKVVKVVRRMVRGRYKYYLQMSIEGEKPLKGRKLGKGNVGIDLGPTTVAVSGENIASIDKLASKCDSIETEKAKLGRKIDRSRRANNPQNFNEDGTIKRGIRLEWNDSKRYKELRVEMAELQRRQAAIRKQQHIDRANELLKEGDTFIVENNQISGWTRKAKETKVNENTGKIRKKKRFGKSVANHAPAMFMTILENKVKSLGGKVVKVDTQNAASQYDFTNNSFTKHELNERSVTLSNGDTHQRDMLAAFNLQHLKYDEQEKKQYDTEAMTKHYERFCELEQAEILRYKNKEKVDDHSTIGAKEL

SEQ ID NO: 2943 - protein, 612 aa, unidentified
  REGION 1..612: note = Description of Unknown: uncultivated organism sequence
  REGION 1..612: note = Category: MG91 effectors
  REGION 1..612: note = Description: MG91-134 effector
MTENFVLTLPLKVEKWQADILDRRYELLRQTYNMVQRKLVRQYIYFSQQKAYKACKGDFSQLREFFASHPFHFKGITSKNGELSDIKFPYTYESRSSGSGKRAPNSISDYVSKLWTHRIGQDKTLADLGINGSILEELGLHIMSAWGKRLYDPKASRISFKDYGDVNSFGSRYHKGNFAGFTINLEEGFITYNANGRRGRYADIIKLPIDFSREKNDYAAYALKGGIESFRKLLIVRRCIRGRNKYYLQLNINGEKPQKGRTLGKGNVGIDIGPSTIATSSLQGVHFDKLADKCDNLEHELYLINRKLDRSRRANNPHNYNEDGTIKRGVRLMWKQDKDVKRYASLKQKRRELYRRQAEIRKLQHLEMANAMLSQGDTFIVENNPIDAWVRRAKETTKTKTGRNRCKKRYGKSVANHAPAMFVTILKNKVQSLGGQFLEVDVRYAATQFDFTNGIKTKHEVSERSITLSNGNTHQRDMLSAFNLQHIRQESIGTEDKDYDIEQMQADYPIFCKLETAEQERFKVARHKERDALYFLGASKKQLRRQPQDESVANRHNGGVGRKHCNTRLGSNNQENAKIRGSGHVRESIERVSQVPDGYHLVGNHPIILDGL

SEQ ID NO: 2944 - protein, 525 aa, unidentified
  REGION 1..525: note = Description of Unknown: uncultivated organism sequence
  REGION 1..525: note = Category: MG91 effectors
  REGION 1..525: note = Description: MG91-135 effector
MNEVFVLELPLQVEKYQADLLNKRYEQLRQLYNYVQGKLLRQYRYFEQMKEFQACKTFKEKKDFFRRHPFHIDGILGSNKELYDITFDEYGINGFVGKLGKKQVSAGVTYADLGITSTLLDRLSLAVWAAWDKMLYDYHAQRVSFRKYGELNIFGSRKKTNGSGKKVFSGMELHLEKMEVAIKLNGKVGKAAKFITLPILHNPKHIDYEMWALKGGFDSVTVLTIVRRLVRSQYKYYVQLTIEGEKPQKGRKLGKGNVGIDLGPTTVAVSGVNVVSIDKLASKCDDIQEEITRLSRRIDRSRRANNPQNFNEDGTIKRGIKLVWNDSNRYKELRRELAELRRKQAAIRKQQHIERANALLKEGDTFIVENNPISSWTTRAKETKVNEKTGKIQKKKRFGKSVANHAPSMFVSILENKVKSLGGDLVKVDTKNAASQYDFTNNSFTKHELKERNVTLSNGDTHQRDMLAAFNLQHLQYDEKDDKQYDTEAMTADYERFCQLEQEEILRYKNKVKKDDRSTIGAEKL

SEQ ID NO: 2945 - protein, 527 aa, unidentified
  REGION 1..527: note = Description of Unknown: uncultivated organism sequence
  REGION 1..527: note = Category: MG91 effectors
  REGION 1..527: note = Description: MG91-136 effector
MPTENFVLELPLRVEKYQADILDKRYEQLRQLYNYVQGKLLRQYRYFEQMKAYQDCNSIKEKREFFSSHPFHINGIYGRNKDLLDITFSKFGIFGLVTKLGQKSVGSGYTYTDCGISSTILAHMSANIWSAWNKMLNDYHTKRISFKRHGELNSFGSGKIDNEYFPGLVLRLEKMELDIKLNGKTGKNAKFITLSILHNPKHADYEMMALKGGFDSVKVITVVRRMVRGRYKYYLQMSIEGEKPKKGRTLGKGTVGIDLGPSTIAVSGNNIASIDKLASKCDNIEKKIQKLNRKIDRSRRANNPDNYNEDGTYKRGVRLSRNESNRYKALRKEKAELQRRQAAIRKLQHIERANELLKEGDTFVVENNQFKGMAKRSKETKVDEKTGKMRSKKRSGKSIANHAPAMFVTILKNKVESLGGRFEIVNTNNAASQYDFTDGSFTKHELSERNITLSNGDTHQRDMLAAFNLEHLKYEAKDPKKYDSEAMHEHYERFCQLEREEIERYKNKEKKDDRSTISASTIVYDKK

SEQ ID NO: 2946 - protein, 528 aa, unidentified
  REGION 1..528: note = Description of Unknown: uncultivated organism sequence
  REGION 1..528: note = Category: MG91 effectors
  REGION 1..528: note = Description: MG91-138 effector
MEEVFVLELPLQVEKYQADILNKRYEQLRQLYNYVQGKLLRQYRYFEQMKEFQVCKTFKEKRDFFRSHPFHINGIYGNDKELLDITFDEYGINGFVGKMGKKLVNANTTYADLGITSTLLDRLSLAVWAAWDKMLYDYRARRVSFKKHGELNIFGSRKKTNGSGKKMFSGMELHLEKMEVSIKLNGKVGKKAKFITLPILHNPKHADYEMWALKGGFDSVKVITVVRRLVRGQYKYYLQLSIEGEKPQKGRTLGKGNVGIDIGPTTVAVSGENIASIDKLASKCDNIQKEITRLARKIDRSRRANNPQNFNEDGTIKRGVRLVWKKDKDCKRYAALKREMAELQRRQAAIRKQQHIDRANALLKEGDAFIVENNQISGWVRKAKETKVNEKTGKIQKKKRFGKSVANHAPAMFVTILENKVKSLGGEVVKVDTQNAASQYDFTNNSFEKHELKERSVTLSNGDTHQRDMLAAFNLQHLKYDDAEKKQYDTEAMAQHYDRFCELEQAEIQRYKNKEKKDDRSTIGAGDL

SEQ ID NO: 2947 - protein, 512 aa, unidentified
  REGION 1..512: note = Description of Unknown: uncultivated organism sequence
  REGION 1..512: note = Category: MG91 effectors
  REGION 1..512: note = Description: MG91-139 effector
MNEVFVLELPLQVEKYQADILNKRYEQLRQLYNYVQGKLLRQYRYFEQMKEYQACKTIKEKRDFFKSHPFQVNESLGGDKSAFEISFNEFSIKGFIEKLVQKSVGANMTYADLGFTTNILDHLGASVWAAWDKKLYDFKAKRISFKKYGELDSFSSRRKVVGGKVYFSGMELHLDTMELAIKMNGKQGNNAKFITLKMQHNPKHAEYEMWALKGGVDSVKVVKVVRRLVRSQYKYYVQLTIEGEKPQKGRTLGMGNVGIDLGPTTVAVSGENVVSIDKLASKCDNIQEEITRLSRKIDRSRRANNPQNFNEDGTIKRGIKLVWNDSKRYKELRRELAELRRKQAAIRKQQHIDRANALLKEGDTFIVENNQISSWTTRAKETKVNEKTGKIQKKKRFGKSVANHAPSMFVSILENKVKSLGGEVVKVDTKNAASQYDFTDGSFTKHELKERNVTLSNGDTHQRDMLAAFNLQHLKYDEKDTKQYDTEAMTADYERFCQFEQEEILLYNNKLN

SEQ ID NO: 2948 - protein, 514 aa, unidentified
  REGION 1..514: note = Description of Unknown: uncultivated organism sequence
  REGION 1..514: note = Category: MG91 effectors
  REGION 1..514: note = Description: MG91-140 effector
MIVEKYQADILNKRFEQLRQLYNYAQGKLLRQYRYFEQMKEFQACTTFREKKDFLRSHPFHVNGILDRSGDVLNITFDEYGIKGFLEKLIHKPVGSNMTYADLGITTYILDHLSAGIWRAWDKMLYDYHAKRVSFKKYGELDSFSSRRKTSGNKVYFAGMELHLDTMELSVKLNGKQGKDAKFVTMPILHNPKHADYEMWALKGGEDSVKVVKVVRRLVRGQYKYYVQLSIEGEKPQKGRTLGKGTVGIDLGPTTVAVSGENVVSIDKLAAKCDNIQSEITRLARKIDRSRRANNPQNFNEDGTIKRGVRLVWNDSKRYKALRREMAELQRRQAAIRKQQHIDRANELLKEGDTFIVENNQISAWTRKAKETKVNEKTGKIQKKKRFGKSIANHAPSMFVTILENKVNSLGGKVVKVDTQNAASQFDFTDGSFEKHELKERSVTLSNGDTHQRDMLAAFNLQHLKYDDAKKKQYDTDAMGQHYERFCELEREEIERYKKKEKKDDRGTIGAKGL

SEQ ID NO: 2949 - protein, 521 aa, unidentified
  REGION 1..521: note = Description of Unknown: uncultivated organism sequence
  REGION 1..521: note = Category: MG91 effectors
  REGION 1..521: note = Description: MG91-141 effector
MKEVFVLELPLQVEKYQADILNKRYEQLRQLYNYVQGKLLRQYKYFDQMAEFQACKTINEKRIFFRNHPFHIKGILGGDKEPLNITFDEYGINAFVEKLVQKSAGPNMTYADLGFTTYVFDHLSSGIWRAWEKMLYDYRAKRISFKKYGELNSFSSRRKVVRGKIYFSGMELNLERMELSIKLNGKVGKSSKFTTLPILHNPKHADYEMWALKGGLDSVKVLKVVRRLVRGLYKYYLQMSIEGEKPQKGRTLGKGNVGIDLGPTTIAISGQDIVCIDKLAPKCDNIQKEITRLARKIDRSRRANNPQNFNEDGTIKRGARLVWSDSKRYRELRREKAELQRKQAVIRKQQHIDRANALLEEGETFIVENNPISAWTRRAKETKVNEKTGRIQKKKRFGKSVANHAPSMFVSILENKVKSLGGQLIKADPKNAASQFDFTDGSFEKHELNERSVTLSNGDTHQRDMLAAFNLQHLKGDKQYDTEAMERHYERFCELEKKEIMRYKNKEKKDDRSTIAASDFL

SEQ ID NO: 2950 - protein, 524 aa, unidentified
  REGION 1..524: note = Description of Unknown: uncultivated organism sequence
  REGION 1..524: note = Category: MG91 effectors
  REGION 1..524: note = Description: MG91-142 effector
MNEVFVLELPLQVEKYQADILNKRYEQLRQLYNYVQGKLLRQYRYFEQMKEYQACKTIKEKRDFFKSHPFQVNESLGGDKSAFEISFNEFSIKGFIEKLVQKSVGANMTYADLGFTTNILDHLGASVWAAWDKKLYDFKAKRISFKKYGELDSFSSRRKVVGGKVYFSGMELHLDTMELAIKMNCKQGNNAKFITLKMQHNPKHAEYEMWALKGGVDSVKVVKVVRRLVRSQYKYYVQLTIEGEKPQKGRTLGMGNVGIDLGPTTVAVSGENVVSIDKLASKCDNIQEEITRLSRKIDRSRRANNPQNFNEDGTIKRGIKLVWNDSKRYKELRRELAELRRKQAAIRKQQHIDRANALLKEGDTFIVENNQISSWTTRAKETKVNEKTGKIQKKKRFGKSVANHAPSMFVSILENKVKSLGGEVVKVDTKNAASQYDFTDGSFTKHELKERNVTLSNGDTHQRDMLAAFNLQHLKYDEKDTKQYDTEAMTADYERFCQLEQEEIQRYKNKEKKDDKGTIGAEKL

SEQ ID NO: 2951 - protein, 603 aa, unidentified
  REGION 1..603: note = Description of Unknown: uncultivated organism sequence
  REGION 1..603: note = Category: MG91 effectors
  REGION 1..603: note = Description: MG91-143 effector
MAKENFVLTLPLRVEKRHADILDKRYELLRQMYNMVQQKLVRQYIYFSQQKAYKACENFEQKREFFNTHPFHFKGIKGKNGELCDIKFPYTYESRSSSSGKRPSGGISDYVSKLWSHKVGADKKLVDFGLNGSIMEELGLHVMKAWEDRLYKFKARRVSFEDYGEINSFGCRYHKGNFAGFTINLEEGFITFNANGRRGQFAEIITLPIDFSREKKGYAEEALKGGVDSLRKLIIVRRCIRGRNKYYLQLTISGEKPKKGRTLGMGNVGIDVGPSTIAISSLQGVHFDKLADKCDNIEHKLYLINRKLDRSRRANNPDNYNPDGTIKRGVRLVWKKDKDVKRYASLKQQRKELFRKQAEIRKQQHLEMANAMLSQGDTFIVENNPIDAWVRRAKETKKTKTGKNRCKKRYGKSVANHAPAMFVSILKNKVLSLGGEFREVNPGYAATQFDFTNGVFTKHEVSERSITLSNGRTHQRDMLSAFNLQHICNELKEYNITQMQADYPIFCRLETAEQERFKEARRNERDALYFVGAFAKELRHSPQEETVANRHNGGVGRKHSNTLCTENAKITGSGLVRESIERVAEAPEECYHFDCQPIILDGL

SEQ ID NO: 2952 - protein, 528 aa, unidentified
  REGION 1..528: note = Description of Unknown: uncultivated organism sequence
  REGION 1..528: note = Category: MG91 effectors
  REGION 1..528: note = Description: MG91-144 effector
MNEVFVLELPLQIEKYQADALNKRYEQLRQLYNYVQGKLLRQHRYFEQMKEYQACKKIKEKRFFFRSHPFQINETLKGNKIPFKVSFDEYSIKGYIEKLVQKSVGPNMTYADLGFTTNILDHLGASVWAAWDKKLYDLKAKRISFKKYGELDSFSSRRKVVRGVVYFSGMELHLDSMELAIKMNGKVGKDAKFITLKMLHNPKHADYELWALKGGVDSVKVVKVVRRLVRSQYKYYVQLTIEGEKPQKGRTLGKGNVGIDLGPTTVAVSGVNVVSIDKLASKCDNIQEEITQLSRKIDRSRRANNPQNFNEDGTIKRGIKLVWSDSKRYKELRRELAELRRKQAVIRKQQHIERANALLKEGDTFIVENNPISSWTTRAKETKVNEKTGKIQKKKRFGKSVANHAPSMFVSILENKVKSLGGRFERVSTQNAASQYDFTTDTFKTGEEKHKLNERAITLSNGDTHQRDMLAAFNLQHLKYDEKDAKQYDIEAMTADYERFSQLEQEEILRYKNKVKKDDRGTIGAEKL

SEQ ID NO: 2953 - protein, 484 aa, unidentified
  REGION 1..484: note = Description of Unknown: uncultivated organism sequence
  REGION 1..484: note = Category: MG91 effectors
  REGION 1..484: note = Description: MG91-145 effector
MAHKENQKAFVVTFPLRTEKWQEDRIDKMMRMLTTFYNDRQRKLVRRYIYLSHSKAYKEAKGKGVVAFKNYMKENGFSQYGLDAFFKADTKGALYQCGLNSMFLQYLSQCAWSAWDKKLFGKGDFVKTDKVINIFCSRNKKERFCGFDYDLSTFTISIKSTCTKKIICTIPFVVNKKSDYELFALSQRICRIGIVRKLIRGKYKYYVQFTFDGVPYHKGRNIGTGIVGIDPGPSKIAIVGDNKVEIAKLAPNIEEDERKTARLKRKLDRSRRATNPHMYKEDGTIIKGQRQTCFSKVYNETRKQLADAQRKLAAKRKIAHNELANTLLEYGDTFKVEANSYKSMQARTKATSMTKSGRIRSKKRYGKSIKNRAPSEFLVILKNKLLHYPNGKYYAVPASYACTQFDFTNESFTEHKISERKIVTSDGVQHNRDTLAAFNIKNAIVNETSTKKKKITKSNEFFDIVRMKASYNEFCLMERYLLSI

SEQ ID NO: 2954 - protein, 603 aa, unidentified
  REGION 1..603: note = Description of Unknown: uncultivated organism sequence
  REGION 1..603: note = Category: MG91 effectors
  REGION 1..603: note = Description: MG91-146 effector
MAKENFVLTLPLRVEKRHADILDKRYELLRQMYNMVQQKLVRQYIYFSQQKAYKACENFEQKREFFNTHPFHFKGIKGKNGELCDIKFPYTYESRSSSSGKRPSGGISDYVSKLWSHKVGADKKLVDFGLNGSIMEELGLHVMKAWEDRLYKFKARRVSFKDYGEINSFGCRYHKGNFAGFTINLEEGFITFNANGRRGQFAEIITLPIDFSREKKGYAEEALKGGVDSLRKLIIVRRCIRGRNKYYLQLTISSEKPKKGRTLGMGNVGIDVGPSTIAISSLQGVHFDKLADKCDNIEHKLYLINRKLDRSRRANNPDNYNPDGTIKRGVRLVWKKDKEVKRYASLKQQRKELFRKQAETRKQQHLEMANAMLSQGDTFIVENNPIDAWVRRAKETKKTKTGKNRCKKRYGKSVANHAPAMFVSILKNKVLSLGGEFREVNPGYAATQFDFTNGVFTKHEVSERSITLSNGRTHQRDMLSAFNLQHIGNELKEYNITQMQADYPIFCRLETAEQERFKEARRNERDALYFVGAFAKELRHSPQEETVANRHNGGVGRKHSNTLCTENAKITGSGLVRESIERVSEAPEECYHFDRQPIILDGL

SEQ ID NO: 2955 - protein, 528 aa, unidentified
  REGION 1..528: note = Description of Unknown: uncultivated organism sequence
  REGION 1..528: note = Category: MG91 effectors
  REGION 1..528: note = Description: MG91-147 effector
MKTKEEKKDFVIELPLKVEKWQEHLLSKRCEFLRDIYNYVQNNLLRQFGYFEQMSEWKNCKTKKSKGKFLESHPFTIKGFDTPITFTKYGISNFVSKLCQKKVSREKKYKDFGLNSMTLQQMGLNVWSAWNKKIYDKPRVIKNKETGEIKIKPYEIHFKKRGGLNTIFFGKSNNYFIGLEIDFEHMILYYNINGKQGKNKQSITLPIVFNKPTEYEMFAFKGGYETIKLIKIVRKLIRGRYKFYVQFTIEGEKPQKGRTLGKGVVGIDVGPSTVAVSSLNGVQINTLAEKCDDVYHKCKLLGRKMDRSRRATNPQNYNDDGTIKKGEKLEWNYSKRYLKVRNKRCELLRKQAAIRKLQHNIDTNELLRLGDTFVVEKNPISAWQQRGKKIKINKRGRIQTNKRFGKSIANHAPAMFITILENKVKSLGGEFKRVPIENGASSFDFTNSEFVKHGLSERKITLSNGNVHQRDMIAAYNLQHLNYNSEELKDYNIEDMKKDYPIFCELEKMEIDKYISGQKKSHKSTVGY

SEQ ID NO: 2956 - protein, 524 aa, unidentified
  REGION 1..524: note = Description of Unknown: uncultivated organism sequence
  REGION 1..524: note = Category: MG91 effectors
  REGION 1..524: note = Description: MG91-148 effector
MNEVFVLELPLQVEKYQADILNKRYEQLRQLYNYVQGKLLRQYRYFEQMKEYQACKTIKEKRDFFKSHPFQVNESLGGDKSAFEISFNEFSIKGFIEKLVQKSVGANMTYADFGFTTNILDHLGASVWAAWDKKLYDFKAKRISFKKYGELDSFSSRRKVVGGKVYFSGMELHLDTMELAIKMNGKQGNNAKFITLKMQHNPKHAEYEMWALKGGVDSVKVVKVVRRLVRSQYKYYVQLTIEGEKPQKGRTLGMGNVGIDLGPTTVAVSGENVVSIDKLASKCDNIQEEITRLSRKIDRSRRANNPQNFNEDGTIKRGIKLVWNDSKRYKELRRELAELRRKQAAIRKQQHIDRANALLKEGDTFIVENNQISGWATRAKETKVNQKTGKIQKKKRFGKSIANHAPSMFVSILENKVKSLGGEVVKVDTKNAASQYDFTNGSFTKHELKERNVTLSNGDTHQRDMFAAFNLQHLKYDETEAKQYDTKAMAADYERFCQLEQEEIQRYKNKEKKDDRSTIGAEKL

SEQ ID NO: 2957 - protein, 557 aa, unidentified
  REGION 1..557: note = Description of Unknown: uncultivated organism sequence
  REGION 1..557: note = Category: MG91 effectors
  REGION 1..557: note = Description: MG91-149 effector
MVTQKCRPLTGVGAESRAGFQVMVTQKCWLIEIMEEVFVLELPLQVEKYQADILNKRYEQLRQLYNYVQGKLLRQYRYFEQMTEFQACKKIKEKRDFFRSHPFQINETLKGNNTPFKVSFDEYSIKGFVEKLVQKSVGPNMTYADLGFTTYILDHLGTSVWSAWNKKLYDFKAKHISFKKHGELDSFSSRRKVVRGVVYFSGMELHLDTMELSIKLNGKVGKEAKFITMSILHNPKHAEYEMWALKGGLESVKVVKVVRRLVRGQYKYYAQLTIEGEKPQKGRTLGKGNVGIDIGPTTVAVSGENIASIDKLASKCDNIQEEITRLARKIDRSRRANNPENFNEDGTIKRGVRLVWNDSKHYKELRRELAELQRRQAAIRKQQHIDRANELLKEGDTFIVENNQISGWTRKAKETKVNEKTGKIQKKKRFGKSIANHAPAMFVTILENKVKSLGGEVVKVDTQNAASQYDFTNNSFEKHELKERSLILSNGDTHQRDMLAAFNLQHLKYDAPEKKQYDTEAMTQHYDRFCELEQAEIQRYKNKEKKDDRSTIGAGDL

SEQ ID NO: 2958 - protein, 524 aa, unidentified
  REGION 1..524: note = Description of Unknown: uncultivated organism sequence
  REGION 1..524: note = Category: MG91 effectors
  REGION 1..524: note = Description: MG91-150 effector
MEEVFVLELPLQVEKYQADILNKRYEQLRQLYNYVQGKLLRQYRYFEQMTEFQACKKIKEKRDFFRSHPFQINETLKGNNTPFKVSFDEYSIKGFVEKLVQKSVGPNMTYADLGFTTYILDHLGTSVWSAWNKKLYDFKAKHISFKKHGELDSFSSRRKVVRGVVYFSGMELHLDTMELSIKLNGKVGKEAKFITMSILHNPKHAEYEMWALKGGLESVKVVKVVRRLVRGQYKYYAQLTIEGEKPQKGRTLGKGNVGIDIGPTTVAVSGENIASIDKLASKCDNIQEEITRLARKIDRSRRANNPENFNEDGTIKRGVRLVWNDSKHYKELRRELAELQRRQAAIRKQQHIDRANELLKEGDTFIVENNQISGWTRKAKETKVNEKTGKIQKKKRFGKSIANHAPAMFVTILENKVKSLGGEVVKVDTQNAASQYDFTNNSFEKHELKERSVILSNGDTHQRDMLAAFNLQHLKYDAPEKKQYDTEAMTQHYDRFCELEQAEIQRYKNKEKKDDRSTIGAGDL

SEQ ID NO: 2959 - protein, 527 aa, unidentified
  REGION 1..527: note = Description of Unknown: uncultivated organism sequence
  REGION 1..527: note = Category: MG91 effectors
  REGION 1..527: note = Description: MG91-151 effector
MNEVFVLELPLQVEKYQADILDKRYEQLRQLYNYVQGKLFRQYRYFEQMKEYQACEKINEKKDFFRTHPFLINETLKGIKTPFMVSFDEYSIKGFIEKLAQKQVGPNMTFADLGFTTYILDHLGASVWAAWDKKLYDFKAKRISFKKYGELDSFSSRRKVVRGVVYFSGMELHLDTMELAIKMNGKVGKEAKFITLKMLHNPKHADYEMWALKGGVEIVKVVKVVRRLVRSQYKYYVQLTIEGEKPQKGRTLGKGNVGIDLGPTTVAVCGENVVSIDKLASKCDNIQEKITRLSRKIDRSRRANNPQNFNEDGTIKRGIKLVWKKDKDLKRYSKLKRELVELRRKQTAIRKQQHIDRANALLKEGDTFIVENNQISSWTMRAKETKVNEKTGRIQKKKRFGKSVANHAPSMFINILENKVKSLGGKVVKVDTKNAASQYDFTDGSFTKHELKERNVTLSNGDTHQRDMLAAFNLQHLKYNEKETKQYDTEAMAADYERFCQLEQEEIQRYKNKEKKDDRGTIGAEKL

SEQ ID NO: 2960 - protein, 528 aa, unidentified
  REGION 1..528: note = Description of Unknown: uncultivated organism sequence
  REGION 1..528: note = Category: MG91 effectors
  REGION 1..528: note = Description: MG91-152 effector
MNEVFVLELPLQIEKYQADALNKRYEQLRQLYNYVQGKLLRQHRYFEQMKEYQACKKIKEKRIFFRSHPFQINETLKGNKIPFKVSFDEYSIKGYIEKLVQKSVGPNMTYADLGFTTNILDHLGASVWAAWDKKLYDLKAKRISFKKYGELDSFSSRRKVVRGVVYFSGMELHLDSMELAIKMNGKVGKDAKFITLKMLHNPKHADYELWALKGGVDSVKVVKVVRRLVRSQYKYYVQLTIEGEKPQKGRTLGKGNVGIDLGPTTVAVSGVNVVSIDKLASKCDNIQEEITQLSRKIDRSRRANNPQNFNEDGTIKRGIKLVWSDSKRYKELRRELAELRRKQAVIRKQQHIERANALLKEGDTFIVENNPISSWTTRAKETKVNEKTGKIQKKKRFGKSVANHAPSMFVSILENKVKSLGGRFERVSTQNAASQYDFTTDTFKTGEEKHKLNERAITLSNGDTHQRDMLAAFNLQHLKYDEKDAKQYDTEAMTADYERFCQLEQEEILRYKNKVKKDDRGTIGAEKL

SEQ ID NO: 2961 - protein, 527 aa, unidentified
  REGION 1..527: note = Description of Unknown: uncultivated organism sequence
  REGION 1..527: note = Category: MG91 effectors
  REGION 1..527: note = Description: MG91-153 effector
MTEVFVLELPLQIEKYQADLLNKRYEQLRQLYNYVQGKLLRQYRYFEQMKEYQACKTIKEKRDFFRSHPFQITETLKGNKTLFTVSFEEYSIKGFVEKLAQKPVGSNMTYADLGFTTYILDHLGASIWAAWDKKLYDFKAKRISFKKYGELDSFSSRRKVVRGIVYFSGMELHLDTMELAIKMNGKVGKEAKFITLKILHNPKHAEYEMWALKGGVDSVKVVKVVRRLVRSQYKYYVQLTIEGEKPQKGRTLGKGNVGIDLGPTTVAVSGMNIVSIDKLASKCDNIQPKITRLSRKLDRSRRANNPDNYNEDGTIKRGVKLVWKKEKDLKRYSKLKRELAELRRKQAAIRKQQHIDRANALLKEGDTFIVENNQISGWTTRAKETKVNEKTGKIQKKKRFGKSVANHAPSMFVSILENKVKSLGGEVVKVDTKNAASQYDFTNNSFTKHELKERNVTLSNGDTHQRDMLAAFNLQHLKLDEAKTEQYDTAAMAADYNLFCQLEQEEIQRYKNKEKKDDRSTIGADKL

SEQ ID NO: 2962 - protein, 326 aa, unidentified
  REGION 1..326: note = Description of Unknown: uncultivated organism sequence
  REGION 1..326: note = Category: MG91 effectors
  REGION 1..326: note = Description: MG91-154 effector
MNEVFVLELPLMVEKYQADILNKRYEQLRQLYNYVQGKLLRQYRYFEQMADYQVCKTIREKRDFLKNHPFNINGVLDRRGKLLDITFDEYGIQGFVEKMIHKSVGNNISYADLGLNTLILDYLAASIWRAWDKKLYDLNAKRISFKKHGELDSFSSRRKVVNGTARFFGLELYLDKMELAVKVNGKQGKNAKFITLKIQHNPKHVDYEMWALKGGVDSVKVVKVVRRLVRSQYKYYVQLTIEGEKPQKGRTLGKGNVGIDLGPTTVAVSGENIVCIDKLASKCDNIQDEITRLSRKIDRSRRANNPQNFNENATIKRGIRLVWNDS

SEQ ID NO: 2963 - protein, 525 aa, unidentified
  REGION 1..525: note = Description of Unknown: uncultivated organism sequence
  REGION 1..525: note = Category: MG91 effectors
  REGION 1..525: note = Description: MG91-155 effector
MTEVFVLELPLQVEKYQADILNKRYEQLRQLYNYVQGKLLKQYRYFEQTKKFRACKTIKEKRDFFKKHPFHINGILGSNKELLDITFDEYGISGFVTKLGMKNIGSNISYTDVGINSSILAKLSSNIWSSWIKFLYDSKAKRIAFKKYGELNSFGCGKKTNGSRKKIFSGMELNLERMELSIKLNGKVGKSAKFIILPILHNPKHEDYEMMALKGGFDSVKVITVVRRMVRGHYKYYLQMSIEGEKPQKGRTLGKGNVGIDLGPTTVAVSGENIASIDKLAPKCDNIEAAKVKLSRKIDRSRRANNPLNFNKDGTVKRGVRLVWNDSNRYKALRCEMAELHRKQAAIRKQQHIDRANALLKEGDTFIVENNQISGWTRRAKETKVDETTGKIRKKKRFGKSVANHAPSMFVTILENKVKSLGGQVVKVDTQNAASQYDFTNDSFEKHELKERSVTLSNGDVHQRDMLAAFNLQHLKYDETEKKKYNRKAMEQHYERFCELEKEEIRRYKEKEKADDRSTIGTSNF

SEQ ID NO: 2964 - protein, 405 aa, unidentified
  REGION 1..405: note = Description of Unknown: uncultivated organism sequence
  REGION 1..405: note = Category: MG91 effectors
  REGION 1..405: note = Description: MG91-156 effector
MPRFKSSKRGLHSIEGKTNKTGLKFRPEKKVLNWCGHDYRVLIDPKDDYIQRALKENERSDKYRKIKYCRLVRKRIRSSDRFFLQVVLEGTAPVKHVYAPVTERAAIDPGPQSIALFSKEFAGKIQVAGSNNFNEAVSRRLLRAMDRSLRRNNPDAYNEDGTIKKGAKLVKSKNYQRKVDRLREMHREAAAERKCRHGQTINLLLSIAGDIRIEKNSWKAFQRGHFGKSLGKSAMSGFIAQLKSKAASAGLKVTEVNPYKLKLSQYDPYTDTYRKKDLSERWQEMKAGSGQYIQRDVLSALLLYCANIEKEIHIPKVAVEQLEGAKQFLTDAGYVVLKSTSGRDQRDPRLASEPKAMTPEMARQKILRGAGDSHLPTDQELGQIRAGGKVSTWSKETFPLQRGVV

SEQ ID NO: 2965 - protein, 530 aa, unidentified
  REGION 1..530: note = Description of Unknown: uncultivated organism sequence
  REGION 1..530: note = Category: MG91 effectors
  REGION 1..530: note = Description: MG91-157 effector
MTSQSFVIELPIAVDDAEMRTIVRKLEFARQLHNATLGTAMGQLQQMRQDAAWKEACVMPKGKERAAAFRALDRKYGLTEYDLHSVIARHREGSGRKAELGINETQKIATRVFQAINRYKLGLGGMPRFKSSKRGLHSIEGKTNKTGLKFRPEKKVLNWCGHDYRVLIDPKDDYIQRALKENERSDKYRKIKYCRLVRKRIRSSDRFFLQVVLEGTAPVKHVYAPVTERAAIDPGPQSIALFSKEFAGKIQVAGSNNFNEAVSRRLLRAMDRSLRRNNPDAYNEDGTIKKGAKLVKSKNYQRKVDRLREMHRVAAAERKCRHGQTINLLLSIAGDIRIEKNSWKAFQRGHFGKSLGKSAMSGFIAQLKSKAASAGLKVTEVNPYKLKLSQYDPYTDTYRKKDLSERWQEMKAGSGQYIQRDILSALLLYCADIEKEIHIPKVAVEQLEGAKQFLTDAGYVVLKSTSSRDQRDPRLASEPKAMTPEMARQKILRGAGDSHLPTDQALGRIRAGGKVSTWSKETFPLQRGVV

SEQ ID NO: 2966 - protein, 528 aa, unidentified
  REGION 1..528: note = Description of Unknown: uncultivated organism sequence
  REGION 1..528: note = Category: MG91 effectors
  REGION 1..528: note = Description: MG91-158 effector
MKEIFVLELPLKVEKYQADILDKRYEQLRQLYNYVQGKLLRQYRYFEQMKEFQACKKIKEKRDFLRNHPFHVNGIYGLNKELLDISFDEYGILGWVTKLGQRSISLGRTYSDMGITARMLANLSDNIWSAWKKKLYDYHADRISFKKHGCLNTFGCTKSVTKHGGKVKEYFSGMVLHLERMELDIKTNGRTRKTATFITLPILHNPKHADYEMMALAGGVSSIKVLTVVRRMVRGRYKYYLQMSIEGEKPQKGRTLGKGNVGIDLGPTTVAVSGENVVSIDKLASKCDNIKSEIGKLNRKIDRSRRANNPQNFNEDGTIKRGVRLVWNDSKRYKALLKEKAEMQRKQAAIRKQQHIDRANALLKEGDTFIVENNKISGWTARAKETKVNEKTGKIQKKKRFGKSVANHAPAMFVTILENKVKSLGGQVVKVDTQNAASQYDFTNDTFNKHELKERSITLSNGDTHQRDMLSAFNLQHLKYDEKELKQYDKEGMKDHYKQFCKMEKEEIERYKNKEKKDDRSTIGAEGL

SEQ ID NO: 2967 - protein, 601 aa, unidentified
  REGION 1..601: note = Description of Unknown: uncultivated organism sequence
  REGION 1..601: note = Category: MG91 effectors
  REGION 1..601: note = Description: MG91-159 effector
MIEEFVLTLPLKVELWQADILNKRYEHLRRIYNMVQRKLLRNYIYLSQQDAYRQCKDNNEKRDFWENHPVTIKEFCDKNGNPAIVKFPYTLSRRSKNSGKKASNGISDFVPKFKNHNIGSGLTYGALGINASILEELGLRIQQAWEKRLYNPKSKHISFKEEGDINTFGCREKRGFSGFVLDLSHMMLLVNINGRQHQLAQYLNLPINPNKELTEYEMYALKGGLSSVRKIIISREYIRGRYKYYVQLTIKGEKPQKNRTLGKGTVGIDVGPSTVAVSSLQGVSLDKLADKCDDIERDLWRINRKMDRSKRATNPDFFNKDKTYSKRKKDERRKWTFSNRYKRLKLERRELYRKQAAIRKQQHIEMANALLSQGDEFIVENNPIDSWAKRAKETKKGKNGKNRCKRRFGKSIAHHAPAMFVSILQNKVRSLGGSFREVEIKNAATQFDFTNGEFTKHELNERTVTLSNGRTHQRDMLAAFNLQHLKEEVKDYDIEQMDVDYPLFCKLEEKGIAQFKENRHLDRDVAYFVGASHKTLKFSSANRHNGGVGRKNCNHHSGGRDVAKTGNKSSIMKNCESLEPVSVLPNEYHHSNHQHLKIDGL

SEQ ID NO: 2968 - protein, 483 aa, unidentified
  REGION 1..483: note = Description of Unknown: uncultivated organism sequence
  REGION 1..483: note = Category: MG91 effectors
  REGION 1..483: note = Description: MG91-160 effector
MAHKENQKAFVVTFPLRTEKWQEDRIDKMMRMLTTFYNDRQRKLVRRYIYLLHSKAYKEAKGKGVVAFKNYMKEHGFSQYGLDAFFKADTKGALYQCGLNSMFLQYLSQCAWSAWDKKLFGKGDFVKTDKVVNIFCSRNMKGRFCGFDYDLSTFTISIKSTCTKKIICTIPFVVNKKSDYELFALSQKTCRIGIVRKLIRSKSKYYVQFTFDGVPYNKGRNIGTGIVGIDPGPSKIAIVGDKKVELRKLAPNIIEDERKTARLKRKFDRSRRATNPHMYKEDGTNIKGQRQICFSKAYNETMKQLAEAQRKLAAKRKIAHNKLANTLLEYGDTFKVEANSYKSMQARAKATSMTKSGRIRSKKRYGKSIKNRAPSEFLVILKNKLLRYPKGKYYDVPASYACTQFDFTNESFTQHKISERKIVTSDGIQHNRDTLAAFNIKNAIVNDISKKKKITKSKEFFDIVRMKASYNEFCLMERYLLSV

SEQ ID NO: 2969 - protein, 602 aa, unidentified
  REGION 1..602: note = Description of Unknown: uncultivated organism sequence
  REGION 1..602: note = Category: MG91 effectors
  REGION 1..602: note = Description: MG91-161 effector
MIEEFVLTLPLKVETWQADILNNRYEHLRHIYNMVQRKLLRRYIYLSQQNEYRQCKDNDEKRTFWENHPITFKDFCDKNGNPAIVKFPYTYSHRSKDSGKKASNGISDFVPKFKNRNIGGGLTYGSLGINASILENLGLRIEQAWKKRLYDPKSKHISFKEEGDLNTFGCREKDGFSGFVLDLQKMTLSFNTNGRQGKSAKFIHFTINAGKELTEYEMYALKGGIGSIRKIVVSREYVRGRYKYYVQLTIKGEKPQKNRTLGKGTVGIDVGPSTVAVSSLQGVSLDKLADKCDDIERDLWRINRKMDRSKRATNPNFFNKDKTYSKRKKDERRKWTFSNRYKRLKLERRELYRKQAAIRKQQHIEMANALLSQGDEFIVENNPIDSWAKRAKETKKGKNGKNRCKRRFGKSIAHHAPAMFVSILQNKVRSLGGSFREVEIKNAATQFDFTNGEFTKHELNERTVTLSNGRTHQRDMLAAFNLQHLKEEVKDYDIEQMDVDYPFFCKLEEKGIAQFKENRHLDRDIAYFVGASHKTLKFSSANRHNGGVGRKNCNHHAGSKRNVAETGNKSSSKKNCESMETVSLVPNEYHHSNHQHLRLDGL

SEQ ID NO: 2970 - protein, 537 aa, unidentified
  REGION 1..537: note = Description of Unknown: uncultivated organism sequence
  REGION 1..537: note = Category: MG91 effectors
  REGION 1..537: note = Description: MG91-162 effector
MSTKSFIISLPIITGDQDRRRLQKSFSFGCNLQNAVMGGGWDRVLKMRATAEWQTARAMPKSSERTKAFRDLRVRFRLSENDFHADVAKHRKASGRGHLLGINEGQKLASRAWISVERHLYNGGSPRFISSRRGLHSIEGKTNRTGIIWKADQQCVTVCKHVYRVRVDKRDDWLTRALQDPTDPTKPRKVKYCRIVREMRKGKERFLLQLVAEGTSPLKHAYAGKDLRMAIDPGLGSLTYATEDGTIAKVQIAPSADTDHRAVRKLQRAMERSRQATNPDNYETVEVVRHGKNHKSLKVKSGRLQWRFSKRYESLRAELAEIFRLSAATRKREHGEVCNWLLGHAGHIIVEDNSYKAFQRGRFGKTIGRHAPAALYAQLTNKAESAGLLVEVVSPKKLKPTQHNLLTGQFVKHELWERRVRLGEDDDERWIDRDAAACLNLLYADLEKQTYAPERICEAVLAGVTAWLDAGVVVIQAREGITEREFGRFRRRGIPSLTVQGLRQQGFRGRSDSKSGATPRRKASTVSKPSHLSGEVV

SEQ ID NO: 2971 - protein, 518 aa, unidentified
  REGION 1..518: note = Description of Unknown: uncultivated organism sequence
  REGION 1..518: note = Category: MG91 effectors
  REGION 1..518: note = Description: MG91-163 effector
MNNKKEDDIFVLELPLSVEKWQSDLLDRRYEYLRQIYNYAQRKLIRQYIYLVQTEEYKKCRTKKDKSSFFGNHEFWFNGIKCPITFTEFGIKKYVTKLCKLKVSSGMTYKDFGLNSSHLETLGANMWAAWDKKIYGKGERINIKRYGCLNTFSVRCKSGYFGGLKVILDGNEIYLFLDMNGKKGEKEKKEIKLTVKIGKMTEYEMQALRNGIENIRMVTIARKLVRGKYKYYVQFAIKDEKPKKGRKLGKGSVGIDVGPSTVAVSSLHGVEINTLAEKCDDIHRKVRLIQRKMDRSSRASNPQNYNEDGTIKKVRGQKLKWVRSKNYVRLRNEKRELMRKQAAIRKLSHNIDTNKLLELGDTFVVEDNPISSWTKRASGIRKGKNGKNLSNKRYGKSVANHAPAAYVEILKNKVESLGGKFIKVDTKNGASGYDFTTGEYTKHGVEKRKVTLSNGNVHQRDMLAAFNLQHLNYEDGELKSYNVEEMEKDYPIFCKLEKEEIKRYTSGQKTSHKSTVGY

SEQ ID NO: 2972 - protein, 459 aa, unidentified
  REGION 1..459: note = Description of Unknown: uncultivated organism sequence
  REGION 1..459: note = Category: MG91 effectors
  REGION 1..459: note = Description: MG91-164 effector
MKTAATTSFVAELPLRVGADVEALLERTFGFARNLYNATLGTVLGRYQALRESQAWQLARTLPKKEAGEEFNRLMRQADLTKSGFEKILNKHRHSSGRAEQLDCNSGQKIADRLWDAFMRYRTRQGGKPRFKSERRGIHSIEGKTNTTGFRWKAQEGCVRWGKRRLPVIVNKQDDWLMRALADPIDPSKRRRVKYCRILWRKFGGRKRWFVQLVCEGVSPIKHILAPTERKAGIDPSTKSMTVACACGAVEKVDLATPLKKADREIRLLQRKLDRSRRATNKDNYNEDKTVKKGASGWVYSKHYEKIRTVYADAQRRAAAHRKCVCNEAVNWVLGQAGCIIVEKNNFKAFQKSRYGKSISKAAPGQFVTNLNVKAVSAGLKVFIVPPYELRPSQHDIETGQYVRHELCERWVKLGQSGLWLNRNALAALNLLWLDDAATRYSAARRSERTLGSRETGWA

SEQ ID NO: 2973 - protein, 484 aa, unidentified
  REGION 1..484: note = Description of Unknown: uncultivated organism sequence
  REGION 1..484: note = Category: MG91 effectors
  REGION 1..484: note = Description: MG91-165 effector
MAHKENQKAFVVAFPLRSEKWQEDRIDKIMRMLTTFYNDRQRKLVRRYIYLSHSKAYKEAKGKSVVAFKNYMKENGFSQYGLDAFFKADTKGALYQCGLNSMFLQYLSQCAWSAWDKKLFGNGDFVKTTKVVNIFCSRNQKGKFCGFDYDLSTFTIRIKSTCTKKIICTIPFIVNKKSDYELFALSQKICRIGIVRKLIRSKYKYYVQFTFDGIPYNKGRNIGTGIVGIDPGPSKIAIVGDNKVEILKLAPNIEEDERKTARLKRKLDRSRRATNPHMYKEDGTTIKGQRQTCFSKAYNETRKQLADAQRKLAAKRKIAHNELANTLLEYGDTFKVEANSYKSMQARTKATSVTKSGRIRSKKRYGKSIKNRAPSEFLVILKNKLLYYPKGKYYDVPASYACTQFDFTNESFTEHKISERKIVTSDGIQHNRDTLAAFNIKNSIVNDTSTKKKKITKSKEFFDIKKMKASYNEFCIMEHHLLSV

SEQ ID NO: 2974 - protein, 530 aa, unidentified
  REGION 1..530: note = Description of Unknown: uncultivated organism sequence
  REGION 1..530: note = Category: MG91 effectors
  REGION 1..530: note = Description: MG91-166 effector
MKSSSIIVSYEITLPQRIYLHLDRLFSVFRRSVRNFIDMFWNENTLGLLNQKGHTCSILKEIVQRPQNLPSRVFRNALEITGQILRSQIERKRLFDAFMQYPCLVLYNEREIAKRLNTSTWFALNVKRQILKLIRNGERRDYFSLAKPSFSGSVVITSADDSLEKGQFKRLRIEKNKLIFELKVPVGNAWDWIKVEKFVPDRLRKALKNAKEIKAPLIKKVDLKSGFSIYRLVIPLEIQTKVKDKVERVFALDLSPSEKRIGVGVVVDSEGYSKPVFFNAYKMFKKLERLYREISNLEKKIDHIADDLHSTFKREHKEKLYQRLRHLYQEQKLRWRKFKDLRKQVLESFTNLVILHAKAYNCDAIAIEDLKFKDLPDWKNKRLRRIFSIWFYSKFEDRLRHKAQREGIKVLSVNPFNTSQVCHECGSKSKANRLEFACESCGKHFDRDYNASVNIGLKALTLACKTKSKPYKGKDIPARFPSLQVLTRYKFKSLLTLLSLSKLVAYLRLVETSYLKLKSLLKYVSADKYG

SEQ ID NO: 2975 - protein, 530 aa, unidentified
  REGION 1..530: note = Description of Unknown: uncultivated organism sequence
  REGION 1..530: note = Category: MG91 effectors
  REGION 1..530: note = Description: MG91-167 effector
MKSSSIIVSYEITLPQRIYLHLDRLFSVFRRSVRNFIDMFWNENTLGLLNQKGHTCSILKEIVQRPQNLPSRVFRNALEITGQILRSQIERKRLFDAFMQYPCLVLYNEREIAKRLNTSTWFALNVKRQILKLIRNGERRDYFSLAKPSFSGSVVITSADDSLEKGQFKRLRIEKNKLIFELKVPVGNAWDWIKVEKFVPDRLRKALKNAKEIKAPLIKKVDLKSGFSIYRLVIPLEIQTKVKDKVERVFALDLSPSEKRIGVGVVVDSEGYSKPVFFNAYKMFKKLERLYREISNLEKKIDHIADDLHSTFKREHKEKLYQRLRHLYQEQKLRWRKFKDLRKQVLESFTNLVILHAKAYNCDAIAIEDLKFKDLPDWKNKRLRRIFSIWFYSKFEDRLRHKAQREGIKVLSVNPFNTSQVCHECGSKSKANRLEFACESCGKHFDRDYNASVNIGLKALTLACKTKSKPYKGKDIPARFPSLQVLTRYKFKSLLTLLSLSKLVAYLRLVETSYLKLKSLLKYVSADKHG

SEQ ID NO: 2976 - protein, 633 aa, unidentified
  REGION 1..633: note = Description of Unknown: uncultivated organism sequence
  REGION 1..633: note = Category: MG91 effectors
  REGION 1..633: note = Description: MG91-168 effector
MLTKDLKQEALKRGFLHSGVNDSIEAYRTRNLTIYDFVCEESAVVRVCISKQHAGIYDVLSNIWKDCMLENYLEDPNQFANYMLSECAKKLLKTDSLFFDSKASFAIDAQIRKAKNWKKINQKENREKEIKKIMAGTNKPVPSGFKIFSEKLLCSAKRIMYSAKEKSLYCPECGNTFQLPDVPKKGSLHTCPACGYSTKVSSAQYLNDIHWSCIVQAAGKRSIIRYFCNELFIEYGKCSTILYEKYRTIVEEDGSMVPLMQTSEGWKDYKGKNYSYFYTVPKREVPNDMYLYGTVEALMKMPALKNSMLDVWVKQHIGADKKLCSEYLVENYIKVYAQTTIYEKLLKHGLNKIAHEAAFYYDSSFHKNEEKVDKFLNLTKGNLDRLREFIPDPSGSNVSAMRYLEKYNVYLKDDELKTFLRLEVSDNMKEQIVKFCKCKKVTLYKINKYVTENANADWSSYFDYIGWTEELDYKKSDSVYYPKKFFKTHDRVFKELEEKKDAIQRKKDKEISKKIADLWEQRMQIPQYYYENNDLFVMMPHGTSDLKKEGRSLNHCVAGYKEFVAEEKTQIFFIRKKAAPQKSFYTLEIKNHDIEQCHGKNNVNMTEEIRAFAYGFLNQLKTIKEKPAVRAAA

SEQ ID NO: 2977 - protein, 484 aa, unidentified
  REGION 1..484: note = Description of Unknown: uncultivated organism sequence
  REGION 1..484: note = Category: MG91 effectors
  REGION 1..484: note = Description: MG91-169 effector
MAHKENQKAFVVTFPLHTEKWQEDRIDKMMRMLTTFYNDRQRKLVRRYIYLSHSKAYKEAKDKGVVAFKNYMKEHGFSQYGLDAFFKADTKGALYQCGLNSMFLQYLSQCAWSAWDKKLFGKGDFVKTDKVVNIFCSRNMKGRFCGFDYDLSTFTIRIKSTCTKKIICTIPFVVNKNSEYELYALSQKICRIGIVRKLIRSKYKYYVQFTFDGVPYNKGRNIGTGIVGIDPGPSKIAIVSDEKVEIAKLAPGIEEDERKTARLKRKLDRSRRATNPHMYKENGTNIKGQRQICFSKSYNETRKQLADAQRKLAAKRKIAHNELANTLLEYGDTFKVEANSYKSMQARTKATSMTKSGRIRSKKRYGKSIKNRAPSELLVILKNKLLYYPKGKYYDVPSSYACTQFDFTNESFTEHKISERRIVTSDGIQHNRDTLAAFNIKNTIVNDTSTKKKKVTKSKEFFDIVKMKASYNEFCLMERYLLSV

SEQ ID NO: 2978 - protein, 511 aa, unidentified
  REGION 1..511: note = Description of Unknown: uncultivated organism sequence
  REGION 1..511: note = Category: MG91 effectors
  REGION 1..511: note = Description: MG91-170 effector
MPSQATTPSFVVELQLRIGSDVEQVLERTFRLAQCLHNATLCTVLKRDGELRASDAWRAAKAMPKGKERTAEFKRLMESAGLTKNGFEKILLDHLRKSGRRDQIDSNTEQKIADRLWDAYQRWRYENGGKPRYKGKRRGLHSLEGKTNKSGIRWKPDNQCIEWLGCRMLARVDKSDELLMRALADPQDPQKPRKVKYCRVLWRNINKRKRWFVQLVCEGTSPVKHVFAPADIKAGIDPSLRSMTCFVEDGTVEKIDISAGLAKSARTIRNVQRRVERKRRSNNPKNYDEKGRVKKGPLKWNISKKQRDLEAKLAECHRKAAAHRKNKAGELANWLLGRAGCIHVEKNQFKAFQRSGFGRSILKGAPRQCITMLKAKAASAGLKVFEVSPRKLRPSQHDIETGEFIKHGLSERWIKLGESGLWINRDAMAALNLLWVDESGENYLPSDDCKKHWEAVKCVLLDAGWLVQLEARDEASEIFLRRFRRKDRPALTVGELRQKRNRGRSDDSSAA

SEQ ID NO: 2979 - protein, 530 aa, unidentified
  REGION 1..530: note = Description of Unknown: uncultivated organism sequence
  REGION 1..530: note = Category: MG91 effectors
  REGION 1..530: note = Description: MG91-171 effector
MTSQSFVIELPIAVDDAEMRTIVRKLEFARQLHNATLGTAMGQLQQMRQDAAWKEACVMPKGKERAAAFRALDRKYGLTEYDLHSVIARHREGSGRKAELGINETQKIATRVFQAINRYKLGLGGMPRFKSSKRGLHSIEGKTNKTGLKFRPEKKVLNWCGHDYRVLIDPKDDYIQRALKENERSDKYRKIKYCRLVRKRIRSSDRFFLQVVLEGTAPVKHVYAPVTERAAIDPGPQSIALFSKEFAGKIQVAGSNNFNEAVSRRLLRAMDRSLRRNNPDAYNEDGTIKKGTKLVKSKNYQRKVDRLREMHRVAAAERKCRHGQTINLLLSIAGDIRIEKNSWKAFQRGHFGKSLGKSAMSGFIAQLKSKAASAGLKVTEVNPYKLKLSQYDPYTDTYRKKDLSERWQEMKAGSGQYIQRDILSALLLYCADIEKEIHIPKVAVEQLEGAKQFLTDAGYVVLKSTSSRDQRDPRLASEPKAMTPEMARQKILRGAGDSHLPTDQALGRIRAGGKVSTWSKETFPLQRGVV

SEQ ID NO: 2980 - protein, 530 aa, unidentified
  REGION 1..530: note = Description of Unknown: uncultivated organism sequence
  REGION 1..530: note = Category: MG91 effectors
  REGION 1..530: note = Description: MG91-172 effector
MTSQSFVIELPIAVDDAEMRTIVRKLEFARQLHNATLGTAMGQLQQMRQDAAWKEACVMPKGKERAAAFRALDRKYGLTEYDLHSVIARHREGSGRKAELGINETQKIATRVFQAINRYKLGLGGMPRFKSSKRGLHSIEGKTNKTGLKFRPEKKVLNWCGHDYRVLIDPKDDYIQRALKENERSDKYRKIKYCRLVRKRIRSSDRFFLQVVLEGTAPVKHVYAPVTERAAIDPGPQSIALFSKEFAGKIQVAGSNNFNEAVSRRLLRAMDRSLRRNNPDAYNEDGTIKKGAKLVKSKNYQRKVDRLREMYRVAAAERKCRHGQTINLLLSIAGDIRIEKNSWKAFQRGHFGKSLGKSAMSGFIAQLKSKAASAGLKVTEVNPYKLKLSQYDPYTDTYRKKDLSERWQEMKAGSGQYIQRDILSALLLYCADIEKEIHIPKVAVEQLEGAKQFLTDAGYVVLKSTSSRDQRDPRLASEPKAMTPEMARQKILRGAGDSHLPTDQALGRIRAGGKVSTWSKETFPLQRGVV

SEQ ID NO: 2981 - protein, 723 aa, unidentified
  REGION 1..723: note = Description of Unknown: uncultivated organism sequence
  REGION 1..723: note = Category: MG91 effectors
  REGION 1..723: note = Description: MG91-173 effector
MAEEKEMRSYNIRINPDADAIKVIERDMKLMEQLYGFIIYKIESHIQQLRDETEYGEYDSNYKEYCRLMAEAEQKKRQCEVLRDAKKRKNIEDPELDSQYKELSAEIIKLDKHRKEWCRKCCEFFKNNKKALCHFVFESRRKVIRLKSDMVTPTENSGFILHHGVNGELYYIYDKTYYMMVEDSIRKANKGDGYSALVCECGVVTKRVSLNEDKTFKDKVYDGVAVLTDDGEIIMPYEYLRIDKLNKNNAHSFSILFVGEYVYSLNKNPKTKKSQKTSMAYKDFGFTSTDFFENIGNRLTLSYADFPKLLSQKHRKNDFMTIMCGYQSKLMDIMCDESGGYFVRMVTHSYGRGKKKYVDIPVLVSHRNKNRIGTERDMDTKVLEKKLKLLETGKTNVIGISKDVIREKSRYYVNIFLEHTGSLGLEYNENSLNQELGVGSVGVDPNMHQIAVYSDSLKKSTIFSLETIRGGIFKQKIYDCYSKLNSLQTKMSRCMDENNSGAKDENGNFIKGKKLFKSKRYLAMKKEVGELHRRIAELKETANIFIAHELLSYGNVFYIEDPRSAEKKRRMQGVVYDVKGRVVKNRKFSRSIQKFSISGMIYKALDVIESRGGKVYWINNKSAATAYVPKGDNVSHGMGERVFNWLGYKVQRDMKSGYVLSGCKELEQTKETYLNKPIYKVVSYDDERLLNDVDVFAESVKEEMERCRDLNVEDKTIGVEKYF

SEQ ID NO: 2982 - protein, 1129 aa, unidentified
  REGION 1..1129: note = Description of Unknown: uncultivated organism sequence
  REGION 1..1129: note = Category: MG91 effectors
  REGION 1..1129: note = Description: MG91-174 effector
MKKLLSINLGITSIGYSVLNELDNDKYSLIDYGVNMFDTPYDKDGNSKKLIHSQIKSTKKLYELRKERKKNLSKLFEDFGFAKKEDFLNQEKENLFINKWGLRAKKAFEEKLTFQELFSILYLIAKHRGYKSLDTDDLLEEFCEKLGLNQEKKKDNGKDNEKGKIKQALKTIETLKLQFPQKTIPQIIYEVEIQKENPTFRNHDNYNYMIRREYINEEIKALVLSQEKFGLFDKNFDSKAFIEKLIETIDDQKESSNDLSLFGNCEYLKNEKVAHQYSLLGDIYKMYQSVANITFNSNPTIKISKEQIKLIANDFFDKLKNGKNISDIKYKEIRKILKLSDDFKIFNKEDSYKSKDKTQENSITKFHFVNNLSKFDKDFIKSILEKSNKYDILKEVFDVLRDEKQPKPIYDKLNNIFSKYDLIKNESIKNNTILELIKNKTGSSLSISHQAMINIIPYFEDGSTIDEIKQKLNLSREEDYLSYKKGIKYLSVAQFENNNNLPINNHPVKYVVSAALRLIKHLHVTYGAFDEIRVESTRELSLNDESKRNIDKVNRENEAKITAILENIEYQQIAQTYGKKLEKYARKILIWDEQERFDIYNGKSIGFGDIFSNSVDIDHIVPQSLGGLSVKHNLVLVHRDTNLQKLNQLPLNFIADKQGFIDRIEYLFKEHKISWKKRKNLLATNLDDTYKDTFESKSLRATSYIEALTAQILKSYYPFPNQTKNSMEVRHIQGRTTSNIRKLLKVKTKIRNTNIHHAIDAILIGLTNQSWLQELSNTFRENMGVIDDVARQNIKKVIPLIEGIEPKELIEMIENNYNAYGEDSIFYKDIFGKTKAVNFWVSKKPMVSKIHKDTIYSKKPNDFYTVKENILNQFIALKVNNDTKANKFYEDFKKNILEKMYVYKTNPNDVICKIVQNRAYDIKELLTSFETIDKKDKEALSEAKQKLDTLIHNPLLDNNNKPIRKVKFYQTNLTGFNIRGGLATKEKTFIGFKASLKNDKLFYERIDVANKNNIKDNDFLIIRNNLICINFKNKNLLGFVESFDENTNKIRMYDSRYPKRLENQPERFKVASGKGRKEFGIAGAIGIIKLNLDILGNINSYQIIGTIQNELYSFFKKLKNDKGNLPINT

SEQ ID NO: 2983 - protein, 1350 aa, unidentified
  REGION 1..1350: note = Description of Unknown: uncultivated organism sequence
  REGION 1..1350: note = Category: MG91 effectors
  REGION 1..1350: note = Description: MG91-175 effector
MSNINYYLGLDLGTDSVGWAVTDPNYKLLRAKGKDLWGIREFEAAKTSAERRSYRTSRRRKQRKTVRIGLLKEYFKDEIDKVDSNFYESLENSFFKKEDKPEGARSKNLLFNDKDFKDSDYYEKYPTIFHLRSELIHSKEPHDVRLVYLAILNIFKHRGHFLNENLSTSSTSVSIEEVYSELRNLLIDKTDIKLPDKIDEKNFEEVMCDRGLSRSEKQKRILDQLEISSKDKDKVEIIKAICGLKVDAKKIFPIESDEKLAFCFAEARFEEIQGDLENSLGDDYFSIIMLMKQIYDTCAWDTVIKGFEYLSDARIDSYNKHARDLKILKKVLKKKGQDAYDRFFRTEEDGTYGDYVGSNVNDGKVGRRGGNKHTRDDFYSAVKNEIKGVDDLDVEVIQSDIDNGTFMPLQLSRDNGIIPYQAHYKELDAILENAQKYLPFLSEKNAESQMTISEMIKKIFAFKIPYFVGPVTEESKKNNGNGWVVRKEEGPVLPWNIDSKIDMEKTSEEFINRLIRKCTYISGEKVLPKNSLIYERYMVLNAINTIAIDGERISVELKQQIYNDLFSKGTVVTKEKLAKYLSGRGLINSKNQISGMDDRINNTLSNYNKFYRIFGNEIKKDSTQNMIEEIIRLCTIFGDSKKDLKNKLEKEYGDKLSKEQLKSILGIKCKDWGKLSKAFIELQGADKSTGEIFSLINALWNTSFNMMELINSDEYTFKEELNKKMETGLKPVNEMVYEDLDGMYLSAPVRRMVWQTLLVIRELEKVLGCPPKKVFVEMTRGDGEKVRTKSRKDVFSELYKKIKEDTPKWLEIIGKAEENGTIRSKKMYLYLRQKGKDMYTGKPISLDDLFNDNLYDIDHIYPQSLTKDDNLDNNMVLVNKSDNSNKQNVYPLSEDIRNKCKGLWKELHDQGFINDEKYSRLTGRSPLTDEQLEEFIARQLVETSQGTKAVAQIMSGAMPESKVVYSKARVVSDFRNKYELLKSRLVNDFHHANDAYLNIVVGNAYLVKFTDNPKRYIKEEYNKDKEKYRYNLAKFFENDVIRGKEVAWVSTKENGEIGTIATVKKMMSKNTPLLTRMNFVGHGGIADQTLYGTDKAKEDGYLPIKGKDSKFKVSKYGGYNKASTAYFFLVESEVKGKKQRTLETVPIFLAAEIDRHPGKLEEYCINDLGLINPDIRIRKIKLQSLVKKDGYLIHITGKTLDRIALRNATGLKLDISWINYIKKLENFAEKGSMESGVISKDKNIELYKLLMDKHKNGIFKNRPNPIGEKLENKLSMFMGLEQEKQINVLVQLLNTTAIVSAAKADLTDIGEAKATGVMLISKKIEGYKRIFLVNQSVTGLYEEEIDLLTV

SEQ ID NO: 2984 - protein, 610 aa, unidentified
  REGION 1..610: note = Description of Unknown: uncultivated organism sequence
  REGION 1..610: note = Category: MG91 effectors
  REGION 1..610: note = Description: MG91-176 effector
MIIFTKISEFIISYWMPVKKDDKPRFVLEMPLKVEQWQADILNVRYELMRRMYNQARRILLSHFYYMVQKNEYQECASNKRERAVYIKNHPIFIKGVTDKKGNVKPITFTEFGIKDVVLSFVTRDVGSGKTYKDFGINTSFADCVASNLWAAWEKFMYDGKCKGVAFKRRFNTISIGKNNGCFGGLKLSLESMTLSVNVNGKQKGNAKFITLPVCGDNQSEYEMQALQGGLESICVVSIARKLIRGKYKYYLQLTIKGHAPNKGRALGCGTVGVDVGPSTVAFVSQSDVQINRLASECDDIEDVIGKIQQKMDRSRRATNPQNFNEDGTLKRISRKNGERRIWNDSRRYRLLCKQKAELQRKQAAVRKMSHILKINQILSLGDTFFVENNPISQWTKRAKETKVSEKTGRYCSKKRAGKSVANHAPAMFVTLLKNKVQSLGGRCREVDIKNAASRFDFTDGQFKVHGLDERIVTLSNNKTHQRDILAAFNLQHIICVDDDKKLKKYDIVRMYADYPAFCDMERAEIEKFVSGEKETDRHTIGAIEELKVVLSSHADDPSVLYSVDKLSANSEGNKTGKKAGSALVHESNDRVLEVLNESTLFTIKDLHVT

SEQ ID NO: 2985 - protein, 1127 aa, unidentified
  REGION 1..1127: note = Description of Unknown: uncultivated organism sequence
  REGION 1..1127: note = Category: MG91 effectors
  REGION 1..1127: note = Description: MG91-177 effector
MSKKILSLDLGITSIGYSILEEVSENRYSLLDYGLSMFDKATDKDGNSKKLLHSSASSAKNLYTLRKERKKSLAKLFELFNFSTSLKLLNQEKENLYINKWELRAKEAFCRRLEVGELFSILYALAKHRGYKSLESGDLLEELCEELNLECNLTKKTEDEDTGKIKLALKTVESLRLDNPHKTVAQIIYEEEILKFTPTFRNHDNYNYMIRREYINDEIKKILLAQEKFGFFKSDFDVTAFIDSVIEIIDDQKESTNDLSLFGNCEYYPKHKVAHQYSFLSDIFKMYESVSNITFNTKPTLKITPSQIKLIAEDFFAKVKKGKNIGDIKYKDIRKVLKLDDDVKIFNKEDSYLRAGKKIENSIIKFHFVNSLSKIDNSFIVIALEDERGYEVLQNIFDVLAYEKSPKSIYEKLKNLVDEKTIIALIQNKHGNSLNISHYAMLQFIPYFEEGLTTDEIKKKIGLERKEDYSKYRKGIKHLNIVEFEKDENLEINNHPVKYVVSATLRVVKHLHSVYNGFDEIRVESTRELSQNEQTKKDIEKANRAQEKEFSRIVEDKEYQKIADSYGKNIKKYARKILLWEEQEYLDIYSGKVIGLGEIFSNEVDLDHIVPQSLGGLSVKHNFVLAHRDTNVQKSNRLAVDFVSDKEAFINRVEHLFSSHKINWKKRKNLLATNLDETFQDVFESKSLRATSYIEALTAQLLKCYYPFIDKKKQVDGSAVRHIQGRATSNIRKLLGVKTKVRDTNIHHAIDALLIGFTNHSWLQKLSNTFRENKGVINDEARAKIKKEFPIIELVVNDEVEYLEPKELCERIENTFNCYGEESVFYKDIWGKNRVVSFWVSKKPMVSKIHKDTIYAKKKEGIFTVRENIINKFIGLKITPTMSSQKFMDIFKKNILEKMYLFKVNPKDFISLVIQKRADEIAELLESFETLDKKDKESMSQAKVDLEVLIHKEILDNSENSIRKVKFFQTNLTGFDVRGGLATKEKTFIGFRAWLEDDKLHYVRIDVANFKKIQKLNDSSFKVYKNDEIFFIMPDGSRRGGKIVSFLEETKKSAFQNAKYPTSSEYQPMQFCKMDKGKKSGAKQQSIGKAIGIIKLNIDIIGNIKSYQVIGNAESELLDFVKETVHG

SEQ ID NO: 2986 - protein, 1127 aa, unidentified
  REGION 1..1127: note = Description of Unknown: uncultivated organism sequence
  REGION 1..1127: note = Category: MG91 effectors
  REGION 1..1127: note = Description: MG91-178 effector
MSKKILSLDLGITSIGYSVLEEVSENRYSLLDYGLSMFDKPTDKDGNSKKLLHSAASSTKNLYTLRKKRKKSLAKLFELSDISTSSKLLNQEKENLYINKWELRAKEAFCRRLEVGELFTIFYALAKHRGYKSLESGDLLEELCEELKIEYNFTKKKEDEDKGKIKLALKTVESLRLENPHKTVAQIIYEEEILKSTPTFRNHDNYNYMIRREYINDEIKKILLAQEKFGFFKSDFDVTAFIKRVIETIDDQKESTIDLSLFGNCEYYPKYKVAHQYSLLSDIFKMYESVSNITFNTKPTLKITPSQIKVIAEDFFAKVKKGKSIGEVKYKDIRKILQLGDDVKIFNKEDSYLRAGKKIENIIIKFHFVNSLSKIDNSFILNALEDERGYEVLQKIFDVLAYEKSPKSIYEKLKNLVDEKTIIVLIQNKHGNSLNISHYAMVQFIPHFKEGLTTDEIKKILGLERKEDYSKYRKGIKYLTIAEFEKDENLEINNHPVKYVVSATLRVVKHLHSVYGAFDEIRIESTRELSQNEQTKKDIEKANRALEKEFSRITEDKEYQKIADSYGKNIKKYARKILLWEEQEYLDICSGKVIGLGEIFSNEVDLDHIIPKSLGGLSVKHNFVLAHRDTNVQKSNRLALDFVSDREAFINRVEHLFSSHKINWKKRKNLLATSLDETFQDVFESKSLRATSYIESLTAQLLKCYYPFTNKKKQLDGSAVRHIQGRATSNIRKLLGVKTKVRDTNIHHAIDALLIGFTNHLWLQKLSNTFRENMGLIDDEARAKIKKEFPIIELVVNDEVEYLEPKELCDRIENAFNSYGEESVFYKDVWGKNRVVSFWVSKKPMVSKIHKDTIYEKKKDGIFTVRESILNKFIGLKITPTMSSQKFTDIFNKNILEKMYLFKVNPKDFICVVIQKRADEIAELLGSLEALDKKDKERVSKAKVDLEALIHKEILDNNGNSIRKVKFFQTNLTGFDVRGGLATKEKTFIGFRTWLKEGKLNYERIDVANLQKIEKLNDSSFKVYKNDEIFFIMPDGSRRGGKIVSFLEETKKSAFQNAKYPTSSEYQPMPFCKMNKGKKSGAKQQSIGKAIGIIKLNLDIIGNIKSYQVIGDAKSDFLDFVKESIRG

SEQ ID NO: 2987 - protein, 1351 aa, unidentified
  REGION 1..1351: note = Description of Unknown: uncultivated organism sequence
  REGION 1..1351: note = Category: MG91 effectors
  REGION 1..1351: note = Description: MG91-179 effector
MKYYLGLDMGTDSVGWAVTDEHYNIVRAKGKDLWGIREFEEAKTAADRRIQRTSRRRLEREKARIGLLKDYFKDEIDKVDPSFYARLDNSFLKIEDKAEEVQYKNILFNDEDFTDRDYYKKYPTIFHLISELIHNTTPHDVRLVYLACLNIFKHRGNFLNPALSKDNTRIDISDKYTELRQALSEQTNIILSEEFNENSFKAIMCDSSKSRTLKYEGLKDLFSIEKSDKQKQEILKAIAGLKVNAKNIFDLDTEEKIEFSFYEGNFDDKAAELEKEMGEDFFNIIALMKEIYDACEWDTVMAGYEYLSDSRVASYEKHKKDLVILKRAFRNNKSKDDYERFFRTDEDGTYGDYTGSNNSREKHRRRGSKHRQEDFYDSVKKEFKGLEKNGDPDIDYILTEISNGTFMPKQLTPSNGVIPFQAHYKELNAILNNASNYLGFLNDIDSESGQSVKADILQIFEFKLPYYIGPVTTKSAENGGNGWVIRRENGKVLPWNIEQKIDTKATSEAFIQRMVRKCTFLSDEKVLPKSSLLYEKFSVLNAINAISIKGERISTNIKQDLYHDKFENGKKVTKTQIVRYLNGRGLDVTENDITGIDDIITSQLSTYHRFYQIFGDDMKKDSYKNMAEDIIYLSTIFGDEKKFLKDKIKEKYGDKLSDEQIKKVLSIKCTDWGKLSKEFLELKGCRKNTGEEISLIDAMWETSLNLMELINSDEFNFNEVLNERQTKAFSSLKELKPEDLDDMYFSAPVKRMVWQTLLIIKELEQVIGSAPERVFVEVTRSHEESKRTVSREKLLLDLYKNEDKYWKDIISEASVNGRIRSKRMYLYLKQQGKDLYTGKEIPLDEVFNKGKYDIDHIYPQSLTKDDSLDNNMVLTDKSVNNHKQNIYPLEKSIRDNCYALWTALHAKGFINDEKYKRLTGNQPLTDGQLEGFIARQLVETSQGTKAICDILTQALPATKVIYSKAKVVSDFRNQYHIYKSRIANDLHHAHDAYLNVVVGNSYYVKFTDSPHRFIKERFRCDGGKYNYNLATFFESDVSNGKETAWIGSGKEYNNDNEKGTILTVRKMLAKTSPMMTRLNFVNKGSIAKEQLISADKCKKDSYLQIKVNDARLDVTKYGGYQKVSAAYFFLVESAGKKGEKIRTLETVPVYLADKIEKNPALLEQYCKDILKLNNIRISVRKIKIQSLIKRNGYFLHISGKSSNQILLRNATNIFYNQEKINYIKKIEKYVDKQEVDEEINTEKNIELYDYLTAKHNGKILLHRPNPIGEKLTKRKDKFAELSLAEQILCLYEILTSTAIVAGGAANLKQLGESPSTGVMTMNKNISKEKELLLINQSVTGIYTNTIDLLKI

SEQ ID NO: 2988 - protein, 64 aa, unidentified
  REGION 1..64: note = Description of Unknown: uncultivated organism sequence
  REGION 1..64: note = Category: MG91 effectors
  REGION 1..64: note = Description: MG91-180 effector
MKVEKWQADILDKRYEYLRQIYNIVQQKLVRQYIYFSQQKAYRDCKNHINDCGLEIKYNTKNYE

SEQ ID NO: 2989 - protein, 1122 aa, unidentified
  REGION 1..1122: note = Description of Unknown: uncultivated organism sequence
  REGION 1..1122: note = Category: MG91 effectors
  REGION 1..1122: note = Description: MG91-181 effector
MLKRILSLDLGVTSIGYSVLEEKENDKYSLLDYGVSMFDAPYNKDGNSKKLLHSQNASTSKLYHLRKKRKKDLAKLFEKFKLGKSEEFLKQEKQNRYKHKWELRGKEVFERKLDISELFTIFYFLAKHRGYKSLDSSDLLEELIEKLGLSKEEKKSKKDDEKGKIKQALRTIEDLKQKFPEKTVASIIYMIEMQKSNPTFRNHDNYNYMIRREYINEEIEKILNIQKEFGLFDKSFELDKFTKELKEIITVQKESTNDLSLFGKCEFYPEYKVAHQYSLLSDIYKMYQAVSNITFDKSKIKIKKEQIQKVANFFLKKIKSGKKISDIKYKDIRAILNLDDAVKIFNKEDNYLRKGKKQENTIVKFHFVSNLAKFDNSFILKAFEKENPYRELKEIFDVLHEEKSPKSIYEKLKDKVDKKTIIELIKNKSGNSLNISSEAIIKCIPYFEDGLTLDEIKQKLDLKRSEDYSSFKKGIKYLHVNQFEKDDKLEINNHPVKSIVSITLRLIKYLHAIYGNFDEIKVESTRELSQNEQIKEDIKKANRDLEKKIDEIVENTEYQNIANQYGKNLKKYARKLLMWEEQERLDIYSGESIGLADIFSNIVDLDHIVPQSLGGLSVKHNFVLVHRNSNLKKSNNLPINFISDKQGYINRVEHLFSEHKINWKKRKNLLAENLDEIYKDTFESKSLRATSYAEALTAQILKRYYPFTNKTKQKDGSAVKHIQGRATSNIRKLLHIKTKSRDTNIHHAIDAILIGVTNHSWLQKLSNTFRENFGVIDEVVRKNIKKAVPYIEGMELKDLVNEIEQNYNSYGEDSIFYKDIWGKTKAINFWVSRKPISSKIHKDTIYAKKPNGIFTVRENIINKFIALKITAKTKPEDFINKFEKDILKKMYLYKTNSNDVICKIVIQRAKDIQKLLVSFENLDTKDKEVMTDAKSKLNALIHSDLIDNNGNIIRKIKFVPKTSPKDGFDIRKGKAISEKTFIGFKTYLEKDKLKYNRIDISNTQKINGKFVVYSKGFKVFKNNLVFFIFSDGTYKGGKIVSFLADKGIAAFSNSKFPASIANQPHSFLTFFNGKPNSHKQHSINKAIGLIKLDLDILGNIKSQQTIGNVQSKLFDFIKEILK

SEQ ID NO: 2990 - protein, 1116 aa, unidentified
  REGION 1..1116: note = Description of Unknown: uncultivated organism sequence
  REGION 1..1116: note = Category: MG91 effectors
  REGION 1..1116: note = Description: MG91-182 effector
MKQILSLDLGITSVGYSVIQEHETDKYSLIDYGVSMFDKPTDKDGNSKKLLHSQALSAKNLHKLRKKRKQNLASLFEKYHLDNRERLLQQEKDNLYKNKWELRAKKVFEKQLSIGEIFTILYHIAKHRGYKSLDSGDLLEELCETLGIETETTKPKKDDERGQIKQALKSVEALREEYPQKTVAQIIYELESKKENPIFRNHDNYNYMIRREYINDEIRKIIKVQIAFGAFRTIDDAFINDVIAVIDDQKESTNDLSLFGKCEYYPEYYVAHQYSLLSDIFKMYQAVANITFNKEKIKITKEQIALIAEDFLGKIKKGKSVKDIKYKDIRKVLKLDDDIKIFNKDDSYLNKGKKQENTITKFHFVDILSKIDKSFVEDIFASDKSYTIMREIFDVLHYEKSPKLIYKQLKNKISDEQVIIDLIRNKKGNSLNISSFAMLQLLPYLKEGLTLDEVKQKLGLQRQEDYAEYKKGIKYLHITNYEKDDELEINNHPVKYAVSAALRVVKHLHTEYGTFDEIKVESTRELSLGEKARKEIEKANKAFEKEIEQIVENVEYQKIAKSYGKNLRKYARKILMWEEQERLDIYSGKSIGITDIFSNSVDLDHIVPQSLGGLSVKHNFVLVHRDENLQKSNQLPMNYIKDTQAYTNRVEHLLREHKINWKKAKNLLATNLDEVFKDRFESKSLRATSYIEALTAQMLKRYYPFKDVRKLKDGSAVRHLQGRATSNIRKVLGVKTKSRETNIHHAIDALLIGVTSHSWLQKLSNTFRENFGCIDDEARKNIKKALPYMDGLEIKDLVKEIEEQYNSFGEDSIFYRNIWGKVKTVNFWVSKKPMSSKVHKDTIYAKKGDGIYTVRENIIAKFIGLKVIPTTSPEEFMKRFHKNILQKMYLFKTNPHDVICKLVEQRGEEIKELLWSFEFLDVKNKEEMSEAKTKLELLIHKDLLDNNGNVIRKVKFYQTNLTGFDVRGGLATKEKTFIGFRAYKENEKLEYERIDIANIEKIQKVNDGSFKAYKNDVVLFIFDDKVYKGGKIVSFLEEKKMAAFSNPKYPANIQSQPESFLTMFNGKANSHKQVSISKAKGIIKLYIDILGNIKSYQVLGNAKSKILDEIKSIVSH

SEQ ID NO: 2991 - protein, 1136 aa, unidentified
  REGION 1..1136: note = Description of Unknown: uncultivated organism sequence
  REGION 1..1136: note = Category: MG91 effectors
  REGION 1..1136: note = Description: MG91-183 effector
MQEEEIMSKKILSLDLGTTSIGYSILNEMDNDRYALIDYGISMFDKATDKDGKSKKLLHSASQSSANLHDLRKERTQNLAMLFEKYKLGRVDALLEQERENRYTDKWYLRAEKAFSEKLETEELFTVLYLMAKHRGYKSLDTDDLLEELLLDLGFEVEEKKEKDAEKGKIKQALKAVESFRQKYPEKTVARIIYEIEIKKDNPTFRNHDNYNYMIRREYINEEIRKIVQAQSKFGLFAKDFDVEVFIKELIVTIDDQKDSTNNLSLFGNCEYYSEHKVAHQYSLLSDVFKMYQSVANITFRKIKITKEQIQIIADDFFKKIQIGKNIADIKYQDIRKLLKLGEGVQVFAKEDYHLDKKGKKVHHTITKFHFLANLSKIDNRFIKSAFEKENKFEILKEIFDVLEFEKAPRGIYIQINEIFMKHKLVDDERLKDETIINLIKYKSGSSLNISAYTMIKFIPYFEKGMTSDEIKQVLKLERNEDYSNYKKGIKYLHTTNFEKDDNLEINNHPVKYVVSATMRLVKHLHATYGAFDEIRVESTRELSQNEETKKAIEKANRENEVKFQKIIENEEYIKIANHYNKNLKRYARKLTLWEEQEKLDIYTGKTIGFEDIFTNAVDIDHIIPQSLGGLSVKHNLVLAHRDDNVKKSNQLPMNFVKDKVDYVNRIEYLFKEYKINWKKKINLLATTLDERYKDTFESKELRATSYIEALTAQMLKRYYPFPDKKKQANGQAVAHVQGRATSNIRKLLGVKIKVRDTNIHHAIDAILIGLTNKSWLQKLSNTFRENMGVIDDRARANIKKEIPLIEGIDPKELVELIEDAYNVYGEESVFYKDIFGKTKAVNFWVSKKPMSSKIHKDTIYAKKPNGLFTVREDIIKQFIALKITTTTDSELFMKAFEKKILQKMYLFRTNPNDVICRIVKSRGDELKSLLQSFVGVDTKDKEIMAEAKEKLDALMHKELLDNNGNTIRKIKFYQSNLTGFDIRGGLATKEKTFIGFKAVLEKEKLVYERIDASNFKRIKKENDASFKVFKNDVVFFVFSDNTFRGGKLVSFLEDGTIASFQNPRYPAAVQFQPSLFCILGKDKEGNPKKSSSKQYKNGKAIGIIKLNLDILGNIKSYSKFGEVSQEVEKSIFHKE

SEQ ID NO: 2992 - protein, 1104 aa, unidentified
  REGION 1..1104: note = Description of Unknown: uncultivated organism sequence
  REGION 1..1104: note = Category: MG91 effectors
  REGION 1..1104: note = Description: MG91-184 effector
MKKILSLDLGITSIGYSILEKKQNNHYTLIDYGVSMFDSPFDKDGKSKKLLHSTNTSMSNLYAKRKQRKKALAKLFEEFGLEKAHKLLQQEKQNIYKNKWQLRCDDVFTRELSVGEFFTILYFIAKHRGYKSLDTNELLEELCEELKLNCEMKSSKKDDEKGKIKQALKRVEELKQNTNKTVAQIIYELELQKQTPTFRNHDNYNYMIRREYIEDELKKLVDAQQHFFKNNKDEFFEKLKEIIIKQDESSNDLNLFANCEYYKEHKVANQYSVVADIFKMYESVANITLNKEKITKEQIKLIADDFFIKIKKGKNIADIKYKDIRKILKLSDDIKIFGKSDSYVSKGKTIHNTIIKFHFLNNLSKFDNSFIVQNLDNLEKLAEIFEVLNKEKSPKTIFEKLNGNVDEKTIIKLIRYKSGKSLNISHYAMLKFIPYFQEGLTTDEIKQKLDLNRCEDYLAYKKGIKYLHINQFEKDDNLEINNHPVKYIVSAVMRVVKHLHTLYGAFDEIKVESTRELSLDDKTRKDIQKANQEFEKKLDDIKQNSQYQQIAQEYDKNLSKYTKKILMWQEQDRVDIYSGKTIGLNEIFSNEVDIDHIVPQSIGGLSVKHNLVLVHRDTNLQKSNQLPMNFVADKVGLKNRVEKLFSEHKINFKKMKNLLATNLDEIYKDSFESKSLRATSYIEALTAQMLKRYYPFADKQKQKDGSAVRHIQGRATSNIRKLLHVKTKVRDTNIHHGIDALLIGVTSHSWLQKISNTFRENFGVIDDKARERVKKELPLIEGVSVAELVAHIEENYNIYGEESVFYKDVFGNVRVVPFWVSKKSMVSKIHKDTIYAKKQNGIFTVREKILNKFISLKITPKTSSDEFMKKFKKEILEKMYLYKTNPKDKICAIIEQRAFEIAKLLDSLQLKDTTDKEMLSETKKYLDEFIHQDLKDYNGNVIRKVQFYQTNLTGFEIRGGLATKEKTFIGFSAILNGKKIKYKRIDVANFESMKKVDGFKVYKNDVVFFIYPDGSFNGGKIVSFLEDKKMASFSNPRFPANIGLQPHSFVTLFKGKANSHKQHSLNKAIGIIKLNLNVLGNIKSFSSMDEVDGELLEFLKGLKG

SEQ ID NO: 2993 - protein, 484 aa, unidentified
  REGION 1..484: note = Description of Unknown: uncultivated organism sequence
  REGION 1..484: note = Category: MG91 effectors
  REGION 1..484: note = Description: MG91-185 effector
MAHKENQKAFVVTFPLRTEKWQEDRIDKMMRMLTTFYNDRQRKLVRRYIYLSHSKAYKEAKGKGVVAFKNYMKENGFSQYGLDAFFKADTKGALYQCGLNSMFLQYLSLCAWSAWDKKLFGKGDFVKTDKVVNIFCSRNKKERFCGFDYDLSTFTISIKSTCTKKIICTIPFVVNKKSDYELFALSQRICRIGIVRKLIRGKYKYYVQFTFDGVPYHKGRNIGTGIVGIDPGPSKIAIVGDNKVEIAKLAPNIEEDERKTARLKRKLDRSRRATNPHMYKEDGTIIKGQRQTCFSKVYNETRKQLADAQRKLAAKRKIAHNELANTLLEYGDTFKVEANSYKSMQARAKATSMTKLGRIRSKKRYGKSIMNRAPSEFLVILKNKLLYYPKGKYYDVPSSYACTQFDFTNESFTEHKISERRIVTSDGIQHNRDTLAAFNIKNAIVNDTSTKKKKVTKSKEFFDIVRMKASYNEFCLMERYLLSV

SEQ ID NO: 2994 - protein, 1126 aa, unidentified
  REGION 1..1126: note = Description of Unknown: uncultivated organism sequence
  REGION 1..1126: note = Category: MG91 effectors
  REGION 1..1126: note = Description: MG91-186 effector
MSKKILSLDLGITSIGYSILEELNNDRYSLIDYGVSMFDKPTDKDGKSKKLLHSASVSAKKLHTLRKERKTNLAQIFEDYKLSNKTTLLNQEKQNIYTNKWELRAKKAFEEKLEISELFTIFYVLSKHRGYKSLDSDDLLEELCQKLGIEVDTKKATKEDDEKGKIKKALQTIENLRIKYPDNTIAQIIYETEILKENPTFRNHDNYNYMIRREYINDEITKIIKAQNGFKAFNFDVDEFIEAIINTIDDQKDSTNNMDLFGNCEYYKEEKVAHQYSLLSDIFKMYQSVSNITFNIAELCEVNPLQKNIKIQKEQIKLIADDFFTKIKKGKNIADIKYKDIRKVLKLSDDFKIFNKEDSYLNKGKKQENTITKFHFVNNLSKIDNSFILNALKQDNRYEILREIFDVLSQEKAPHSIYEKLKDKVDDKTIISLIKYKNGNSLNISHHAMIKFIPYFEEGLTTDEIKQKLGLDRKEDYSEFKKGIKYLHIKTFEKDNNLDINNHPVKYVVSATLRVIKHLHTTYGAFDEIRVESTRELSQNEQTKKDIEKANRALEKEINNIVENKEYQKIADSYGKNLKKYARKILMWEEQNRLDIYSGKNIGFEDIFTNSVDLDHIVPQSLGGLSVKHNFVLVHRDTNLQKSNQLPINFIKDKQEFINRVEYLFSEHKINWKKKINLLANNLDEVFKDSFESKSLRATSYIEALTAQVLKRYYPFPNEKKQNDGSAVRHIQGRATSNIRKLLHVKTKVRDTNIHHAIDAILIGLTNASWLQKLSNTFRDNMGVIDDEARAKIKKEMPLIEGIEPKELVEMIEDRYNEFGEDSIFYKDIFSNVKAVNFWVSKKPMVSKIHKDTIYAKKQDGIFTVREGIINKFVGLKTTTTTSPSKFMESFEKNILKKMYLHKTNPKDAICQIVQKRANEIAILLESFVDLDTKNKELMSDSKVKLDELFHSDMLDNNGNVIRKVKFFQTNLTGFEIRGGLATKEKTFIGFKATLKDSKLKYTRIDVANFEKIQKENTDSFKVFKNDLVFFIYSDGSFRGGKIVSFLEEKGMGAFSNSRFPASIGLQPHSFLTMFNGKANSHKQISLNKAIGIIKLNIDIIGNIKSYQVIGDVKGELLEFIKKLTQ

SEQ ID NO: 2995 - protein, 1122 aa, unidentified
  REGION 1..1122: note = Description of Unknown: uncultivated organism sequence
  REGION 1..1122: note = Category: MG91 effectors
  REGION 1..1122: note = Description: MG91-187 effector
MLKRILSLDLGITSIGYSVLEEKENDKYSLLDYGVSMFDAPYNKDGNSKKLLHSQNASTSKLYHLRKKRKKDLAKLFEKFKLGKSEEFLKQEKQNRYKHKWELRGKEVFERKLDISELFTIFYFLAKHRGYKSLDSSDLLEELIEKLGLSKEEKKSKKDDEKGKIKQALRTIEDLKQKFPEKTVASIIYMIEMQKSNPTFRNHDNYNYMIRREYINEEIEKILNIQKEFGLFDKSFELDEFTKELKEIITVQKESTNDLSLFGKCEFYPEYKVAHQYSLLSDIYKMYQAVSNITFDKSKTKIKKEQIQKVANFFLKKIKSGKKISDIKYKDIRAILNLDDAVKIFNKEDNYLRKGKKQENTIVKFHFVSNLAKFDNSFILKAFEKENPYRELKEIFDVLHEEKSPKSIYEKLKDKVDKKTIIELIKNKSGNSLNISSEAIIKCIPYFEDGLTLDEIKQKLDLKRSEDYSSFKKGIKYLHVNQFEKDDKLEINNHPVKSIVSITLRLIKYLHAIYGNFDEIKVESTRELSQNEQIKEDIKKANRDLEKKIDEIVENTEYQNIANQYGKNLKKYARKLLMWEEQERLDIYSGESIGLADIFSNIVDLDHIVPQSLGGLSVKHNFVLVHRNSNLKKSNNLPINFISDKQGYINRVEHLFSEHKINWKKRKNLLAENLDEIYKDTFESKSLRATSYAEALTAQILKRYYPFTNKTKQKDGSAVKHIQGRATSNIRKLLHIKTKSRDTNIHHAIDAILIGVTNHSWLQKLSNTFRENFGVIDEVVRKNIKKAVPYIEGMELKDLVNEIEQNYNSYGEDSIFYKDIWGKTKAINFWVSRKPISSKIHKDTIYAKKPNGIFTVRENIINKFIALKITAKTKPEDFINKFEKDILKKMYLYKTNSNDVICKIVIQRAKDIQKLLVSFENLDTKDKEVMTDAKSKLNALIHSDLIDNNGNIIRKIKFVPKTSPKDGFDIRKGKAISEKTFIGFKTYLEKDKLKYNRIDISNTQKINGKFVVYSKGFKVFKNNLVFFIFSDGTYKGGKIVSFLADKGIAAFSNSKFPASIANQPHSFLTFFNGKPNSHKQHSINKAIGLIKLDLDILGNIKSQQTIGNVQSKLFDFIKEILK

SEQ ID NO: 2996 - protein, 1129 aa, unidentified
  REGION 1..1129: note = Description of Unknown: uncultivated organism sequence
  REGION 1..1129: note = Category: MG91 effectors
  REGION 1..1129: note = Description: MG91-188 effector
MKKLLSINLGITSIGYSVLNEQDNDKYSLIDYGVNMFDTPYDKDGNSKKLIHSQIKSTKKLYELRKERKKNLSKLFEDFGFAKKEDFLNQEKENLFINKWGLRAKKAFEEKLTFQELFSILYLIAKHRGYKSLDTDDLLEEFCEKLGLNQEKKKDNGKDNEKGKIKQALKTIETLKLQFPQKTIPQIIYEVEIQKENPTFRNHDNYNYMIRREYINEEIKALVLSQEKFGLFDKNFDSKAFIEKLIETIDDQKESSNDLSLFGNCEYLKNEKVAHQYSLLGDIYKMYQSVANITFNSNPTIKISKEQIKLIANDFFDKLKNGKNISDIKYKEIRKILKLSDDFKVFNKEDSYKSKDKTQENSITKFHFVNNLSKFDKDFIKSILEKSNKYDILKEVFDVLRDEKQPKPIYDKLNNIFSKYDLIKNESIKNNTILELIKNKTGSSLSISHQAMINIIPYFEDGSTIDEIKQKLNLSREEDYLSYKKGIKYLSVAQFENNNNLPINNHPVKYVVSAALRLIKHLHVTYGAFDEIRVESTRELSLNDESKRNIDKVNRENEAKITAILENIEYQQIAQTYGKKLEKYARKILIWDEQERFDIYNGKSIGFGDIFSNSVDIDHIVPQSLGGLSVKHNLVLVHRDTNLQKLNQLPLNFIADKQGFIDRIEYLFKEHKISWKKRKNLLATNLDDTYKDTFESKSLRATSYIEALTAQILKSYYPFPNQTKNSMEVRHIQGRTTSNIRKLLKVKTKIRNTNIHHAIDAILIGLTNQSWLQELSNTFRENMGVIDDVARQNIKKVIPLIEGIEPKELIEMIENNYNAYGEDSIFYKDIFGKTKAVNFWVSKKPMVSKIHKDTIYSKKPNDFYTVKENILNQFIALKVNNDTKANKFYEDFKKNILEKMYVYKTNPNDVICKIVQNRAYDIKELLTSFETIDKKDKEALSEAKQKLDTLIHNPLLDNNNKPIRKVKFYQTNLTGFNIRGGLATKEKTFIGFKASLKNDKLFYERIDVANKNNIKDNDFLIIRNNLICINFKNKNLLGFVESFDENTNKIRMYDSRYPKRLENQPERFKVASGKGRKEFGIAGAIGIIKLNLDILGNINSYQIIGTIQNELYSFFKKLKNDKGNLPINT

SEQ ID NO: 2997 - protein, 1129 aa, unidentified
  REGION 1..1129: note = Description of Unknown: uncultivated organism sequence
  REGION 1..1129: note = Category: MG91 effectors
  REGION 1..1129: note = Description: MG91-189 effector
MEKIMNKKILSLDLGITSIGYAILNEIDNDRYELVDYGVSMFDKATDKDGKSKKLLHSASQSSANLHGLRKIRTKNLASLFEKYNLGNAVDFLRQERENTYIDKWYLRAEKSFTEKLKIEELFTILYLMTKHRGYKSLDTDDLLDELLVELGFEVEAKKEKDAEKGKIKQALKTVESYRKKYPAKTVARIIYEIEIKKENPTFRNHDNYNYMIRREYIREEIKKIVLAQNEFGLFTKDFDVDSFIEELIATIDDQKDSTNDLSLFGNCEYYSEHKVAHQYSLLSDIFKMYQSVANITLNKTKITKEQIKIIADDFFKKIEKGKNIADIKYQDIRKVLKLNDEVKIFGKEDYHLNKKSIKVHHTITKFHFLSSLGKIDNTFIKSTFTKENKLEILQEIFDVLEFEKAPKSIYNQLNEIFGKYVLVEDESVKNKTIINLIKYKSGNSLNISAYAMRKFIPYFEKGMTSDEIKQELKLERNEDYSNYYKGIKYLHVNQFEKDDNLEINNHPVKYVVSATMRLVKHLHATYGAFDEIRVESTRELSQNEETKKAIDKANKANEKKFQEIVENEEYQKIANHYNKNLKKYARKIMLWEEQEKLDVYTGKTIGCEDIFTNVVDIDHIIPQSLGGLSVKHNLVLAHRDENVQKSNQLPMNFVKDKKAYENRIEHLFKEYRINWKKKINLLATTLDEAYQDTFESKALRATSYIEALTAQMLKRYYPFLDKKKQANGQAVAHVQGRATSNIRKLLDVKIKVRDTNIHHAIDAILIGLTNKSWLQKLSNTFRENMGVIDDEARANIKKEIPLIEGVEPKELVELIEDAYNIYGEESVFYKDIFGKTKAVNFWVSKKSMSSKIHKDTIYAKKPNNLFTVREDIIKQFIALKITVTTDSETFMKAFEKKILQKMYLFKTNPNDVIVKIVNHRGNELKSLLQSFVNIDIKNKEVMSEAREKLDTLIHQKLVDNNGNIIRKVKFYQSNLTGFDIRGGLATKEKTFIGFRATSNNEKLFYERIDASNFKRIQKENDGSFKVYKNDVVFFIYEDEIFKGGKIVSFLEDKKIASFSNPRYPASIKFQPHSFLTLFKGIPNSHKQYSLNKAIGIIKLNLDILGNIKSYSKFGVVSKEVELKIFHKE

SEQ ID NO: 2998 - protein, 53 aa, unidentified
  REGION 1..53: note = Description of Unknown: uncultivated organism sequence
  REGION 1..53: note = Category: MG91 effectors
  REGION 1..53: note = Description: MG91-190 effector
MAKETFVLTLPLKVEKWQADILDKRYELLRQTYKYGATEIGTSVHLLRSTERI

SEQ ID NO: 2999 - protein, 348 aa, unidentified
  REGION 1..348: note = Description of Unknown: uncultivated organism sequence
  REGION 1..348: note = Category: MG91 effectors
  REGION 1..348: note = Description: MG91-191 effector
MILSFNINGKKNSKAKKIILPINVKNLTEYEMYALKDGYDSINVVTIIRKMIRGKYKYYVQFTIKGEKPQKGRTLGKGNVGIDIGPSTVAISSLNGVTIDTLAEKCNNIEDKISDIERKMDRSRRATNPQNFTEDGQIKRINRKKGEIREWKYSKRYVKLNNKKRELLRKQSAIRKLQHNIKANEVLSLGDTFIVENNPISAWAKRAKGVRKNKNGKIQTNKRFGKSIGNRAPSMFVTILQNKVKSLKGKFVPVNPKNAASRFDFTNGDFTEHNLDERKITLSNGNTHQRDMLAAFNLQHIDLTNDDLKKYNVDEMIEDYPIFCKLEKQEIKRFINGMKISNKSNIGI

SEQ ID NO: 3000 - protein, 1104 aa, unidentified
  REGION 1..1104: note = Description of Unknown: uncultivated organism sequence
  REGION 1..1104: note = Category: MG91 effectors
  REGION 1..1104: note = Description: MG91-192 effector
MKKILSLDLGITSIGYSILEKKQNNHYTLIDYGVSMFDSPFDKDGKSKKLLHSTNTSMSNLYAKRKQRKKALAKLFEEFGLEKAHKLLQQEKQNIYKNKWQLRCDDVFTRELSVGEFFTILYFIAKHRGYKSLDTNELLEELCEELKLNCEMKSSKKDDEKGKIKQALKRVEELKQNTNKTVAQIIYELELQKQTPTFRNHDNYNYMIRREYIEDELKKLVDAQQHFFKNNKDEFFEKLKEIIIKQDESSNDLNLFANCEYYKEHKVANQYSVVADIFKMYESVANITLNKEKITKEQIKLIADDFFIKIKKGKNIADIKYKDIRKILKLSDDIKIFGKSDSYVSKGKTIHNTIIKFHFLNNLSKFDNSFIVQNLDNLEKLAEIFEVLNKEKSPKTIFEKLNGNVDEKTIIKLIRYKSGKSLNISHYAMLKFIPYFQEGLTTDEIKQKLDLNRCEDYLAYKKGIKYLHINQFEKDDNLEINNHPVKYIVSAVMRVVKHLHTLYGAFDEIKVESTRELSLDDKTRKDIQKANQEFEKKLDDIKQNSQYQQIAQEYDKNLSKYTKKILMWQEQDRVDIYSGKTIGLNEIFSNEVDIDHIVPQSIGGLSVKHNLVLVHRDTNLQKSNQLPMNFVADKVGLKNRVEKLFSEHKINFKKMKNLLATNLDEIYKDSFESKSLRATSYIEALTAQMLKRYYPFADKQKQKDGSAVRHIQGRATSNIRKLLHVKTKVRDTNIHHGIDALLIGVTSHSWLQKISNTFRENFGVIDDKARERVKKELPLIEGVSVAELVAHIEENYNIYGEESVFYKDVFGNVRVVPFWVSKKSMVSKIHKDTIYAKKQNGIFTVREKILNKFISLKITPKTSSDEFMKKFKKEILEKMYLYKTNPKDKICAIIEQRAFEIAKLLDSLQLKDTTDKEMLSETKKYLDEFIHQDLKDYNGNVIRKVQFYQTNLTGFEIRGGLATKEKTFIGFSAILNGKKIKYKRIDVANFESMKKVDGFKVYKNDVVFFIYPDGSFKGGKIVSFLEDKKMASFSNPRFPANIGLQPHSFVTLFKGKANSHKQHSLNKAIGIIKLNLNVLGNIKSFSSMGEVDGELLEFLKGLKG

SEQ ID NO: 3001 - protein, 1129 aa, unidentified
  REGION 1..1129: note = Description of Unknown: uncultivated organism sequence
  REGION 1..1129: note = Category: MG91 effectors
  REGION 1..1129: note = Description: MG91-193 effector
MKKLLSINLGITSIGYSVLNELDNDKYSLIDYGVNMFDTPYDKDGNSKKLIHSQIKSTKKLYELRKERKKNLSKLFEDFGFAKKEDFLNQEKENLFINKWGLRAKKAFEEKLTFQELFSILYLIAKHRGYKSLDTDDLLEEFCEKLGLNQEKKKDNGKDNEKGKIKQALKTIETLKLQFPQKTIPQIIYEVEIQKENPTFRNHDNYNYMIRREYINEEIKALVLSQEKFGLFDKNFDSKAFIEKLIETIDDQKESSNDLSLFGNCEYLKNEKVAHQYSLLGDIYKMYQSVANITFNSNPTIKISKEQIKLIANDFFDKLKNGKNISDIKYKEIRKILKLSDDFKIFNKEDSYKSKDKTQENSITKFHFVNNLSKFDKDFIKSILEKSNKYDILKEVFDVLRDEKQPKPIYDKLNNIFSKYDLIKNESIKNNTILELIKNKTGSSLSISHQAMINIIPYFEDGSTIDEIKQKLNLSREEDYLSYKKGIKYLSVAQFENNNNLPINNHPVKYVVSAALRLIKHLHVTYGAFDEIRVESTRELSLNDESKRNIDKVNRENEAKITAILENIEYQQIAQTYGKKLEKYARKILIWDEQERFDIYNGKSIGFGDIFSNSVDIDHIVPQSLDGLSVKHNLVLVHRDTNLQKLNQLPLNFIADKQGFIDRIEYLFKEHKISWKKRKNLLATNLDDTYKDTFESKSLRATSYIEALTAQILKSYYPFPNQTKNSMEVRHIQGRTTSNIRKLLKVKTKIRNTNIHHAIDAILIGLTNQSWLQELSNTFRENMGVIDDVARQNIKKVIPLIEGIEPKELIEMIENNYNAYGEDSIFYKDIFGKTKAVNFWVSKKPMVSKIHKDTIYSKKPNDFYTVKENILNQFIALKVNNDTKANKFYEDFKKNILEKMYVYKTNPNDVICKIVQNRAYDIKELLTSFETIDKKDKEALSEAKQKLDTLIHNPLLDNNNKPIRKVKFYQTNLTGFNIRGGLATKEKTFIGFKASLKNDKLFYERIDVANKNNIKDNDFLIIRNNLICINFKNKNLLGFVESFDENTNKIRMYDSRYPKRLENQPERFKVASGKGRKEFGIAGAIGIIKLNLDILGNINSYQIIGTIQNELYSFFKKLKNDKGNLPINT

SEQ ID NO: 3002 - protein, 1137 aa, unidentified
  REGION 1..1137: note = Description of Unknown: uncultivated organism sequence
  REGION 1..1137: note = Category: MG91 effectors
  REGION 1..1137: note = Description: MG91-194 effector
MKKILSLDLGITSMAYSIIEEFENDRYSLVDYGVSMFDKPTDKDGNSKKLLHSASTSTKNLYNLRKKRKQNLAKLFENFNLSTKSRLLNQEKQNLYINKWELRAKKAFDERLDTTELFSIFYALAKHRGYKSLDSGDLLEELYEKLGIDFQAKKEKDKSKADEKGKIKSALSTIENLRLEHPQKTVAQIIYEVELQKKNPTFRNHDNYNYMIRREYINDEIKKIILSQKEFGFFSDGFNVEEFSKRVVETIDDQKDSTSDMSLFGFCEYYKDKEQRVTHQYSLLSDIYKMYESVSNITFNSKPSIKITPQQIKLIANDFFTKVKKGKNILDIKYKDIRKILNLDDNFKIFNKDDTYLNRGKKQEHIIIKFHFVNTLSKINNQFILDIFEQENKYELLKDIFDVLCFEKAPHAIYEQLKEKIKDEKTIVDLIKYKSGNSLNISHYAMLKFIPYFEQGLTADAIKKKLGLNRKENYSAFKKGIKYLHINKFEEDDNLKINNHPVKYVVSSTLRVIKHLHSVYGAFDEIRVESTRELSQNEQTKKDIEKANRAFEKELDIIIEDVEYQKIAEQYGKNLRKYARKILIYKEQERRDIYTGEGIELKDIFTNVVDLDHIVPKSLGGLSVKHNLVLAHRDSNVRKSNQLPLYFVKDKQSFINRVEYLFEHHKINWKKKKNLLASALDETFQDTFESKSLRATSYIEALTAQVLKRYYPFPNKKKQSDGSAVRHIQGRATSNIRKLLGVKTKVRDTNIHHAIDAILIGFTNQSWLQKLSNTFRENMGLIDDEARANIKKEMPIVELIVNDKVEYLKPKELCQRVEESYSEFGEDSVFYRDVWGEVKVVNFWVSKKPMVSKIHKDTIYSKKQDGIFTVRESIINKFILLKITPTTPSQKFIENFQKNILKKMYLFKTNPKDIICQIVQNRAKSIATLLDTFKDIDSKNKELMSDAKTKLEELIHKDLVDNNGNTIRKVKFYQSALTGFDIRGGLATKEKTFIGFRAWLESDKLQYERIDVANFDTIKKKFDNSFRVFKNDVVFFVYPDGSFRGGKIVSFLDDKGIASFSNPKYPSLSEHQPKSFCKMGKDNNGNPKKSGAKQQNINASIGLIKLSLDIIGNIKSYQVTGNAESELLRFIKDVKNG

SEQ ID NO: 3003 - protein, 1117 aa, unidentified
  REGION 1..1117: note = Description of Unknown: uncultivated organism sequence
  REGION 1..1117: note = Category: MG91 effectors
  REGION 1..1117: note = Description: MG91-195 effector
MKKILSFDLGITSIGYSVLTEDEAQKYSLLDYGVSMFDKPTDKDGNSKKLLHAQALSTKKLYKLRKERKKNLALLFEKYALAKASKLLEQEKKNLYMYKWQLRAKKVFEERLSIGEIFTILYHIAKHRGYKSLDSGDLLEELCVELGIKIDVKKEKKDDEKGKIKQALSTIESLRKEYPKKTVAQIIYEVELQKERPVFRNHDNYNYMIRREHINDEIATIIRKQKEFGNFENIDSEVFIVDIIAAIDDQKESTNDMSLFGKCEYYPKEHVAHQYSLLSDIFKMYQAVANITFNKEKIKITKEQIRLLTEDFLNKIKKGKSVKELKYKDVRKILKLDESVKIFNKEDSYQRAGKKVEHTITKFHFVDNLSKIDKSFIEDIFNADESYVLMREIFDVIHKEKSPKRIYEQLKSKVSSEAVIIDLIRYKKGSSLNISSYAMAKFLPYFEEGMTLDAIKEKLDLGRKEDYSVYKKGIKYLHISTYEKDDDLEINNHPVKYVVSAVLRVVKHLHAKHGTFDEIKVESTRELSLNDKVKKEIDKANKAREKEIEKIISNDEYQKIAKEYGKNIHKYARKILMWEAQERFDVYSGKSIGIDDIFSNRVDVDHIVPQSLGGLYVQHNLVLVHRDENLQKSNQLPMNYITDKEAYINRVEHLFSEHKINWKKRKNLLASNLDEIYKDTFESKDLRATSYIEALTANILKRYYPFIDEKKSVDGSAVRHIQGRATANIRKVLGVKTKSRESNIHHGVDALLIGVTNPSWLQKLSNIFRENFGKIDDEARKNIKKALPYIDGVEVKDIVKEIEQKYNSYGEDSIFYKDIWGKAKTVNFWVSKKPMISKVHKDTIYADKGNGIFTVRESIIAKFINLKITPTTFPEDFMKKFHKEILEKMYLYKTNSNDVICKIVQQRAEEIKELLWSFEFLDVKNKEEMQEAKANLESLVHRELFDNNGNVVRKVKFYQTNLTGFKVRGGLATKEKTFIGFRAFKKDKKLEYKRIDVSNFEKIKKSNDGSFKVYKNDIVFFVFDEEKYKGGKIVSFLEDKKMAAFSNPKYPANIQAQPESFLTIFKGKANSHKQVSVGKAKGIIKLKVDILGNIESYQVLGNAKSKLLDEIKSIVSH

SEQ ID NO: 3004 - protein, 1126 aa, unidentified
  REGION 1..1126: note = Description of Unknown: uncultivated organism sequence
  REGION 1..1126: note = Category: MG91 effectors
  REGION 1..1126: note = Description: MG91-196 effector
MSIATKNGHIMKKILSLDLGTTSIGYSVITEKETQKYSLLDYGVSMFDKPIDADGNSKKLLHSQALSAKKLHKLRKKRKQNLAKLFEYYRLDSAVKLLKQEYENRYIHKWQLRAKKVFEEKLSIEEIFTIFYHIAKHRGYKSLDSGDLLEELCIELGIELEQKKEKKDDEKGKIKQALNTIESLRQEYPQKTVAQIIYEVELQKEQPVFRNHDNYNYMIRREYINDEIATIIRKQKEFGNFENIDSEAFISDLIAVIDDQKESTNDMSLFGKCEYYSDEYVAHQYSLLSDIFKMYQAVANITFNKEKIKITKEQIKLIAEDFLNKIKKGKSIKELKYKDVRKVLNLDDSVKIFNKEDSYQRAGKKVEHTITKFHFVDTLSKIDKSFIEDIFNADNSYALMREIFDVVHKEKSPKRIYEQLKDKVSSEAVIIDLIRYKKGSSLNISSYAMVKFLPYFEEGMTLDTIKEKLKLNRKEDYSEYKKGIKYLHISTYEKDDSLEINNHPVKYVVSAALRVVKHLHAKYGAFEEIKVESTRELSLNDKVKKEIEKANKEREKEIEKIISNKEYQKIAQEYGKNIHKYARKILMWKAQERFDIYSGKSIGLDDIFSSRVDIDHIVPQSLGGLYVQHNLVLVHRDENLQKSNQLPMNYIEDKEAYVNRVEHLFSEHKINWKKRKNLLATNLDEIYKDTFESKDLRATSYIEALTANILKRYYPFTDEKKLADGSAVRHIQGRATSNIRKVLDVKTKNRESNIHHSVDALLIGVTNHSWLQKLSNTFRENFGKIDDEARENIKKSLPYIDGAEVKDIVKEIEEKYYSFGEDSIFYKDIWGKVKTVNFWVSKKPMSSKIHKDTIYAKKGDGIFTVRESIIAKFINLKTTPTTSPEDFMKKFQKEILEKMYLYKTNPNDVICKIIKQRAEEIKELLWSFEFLDVKNKEEMQEAKVKLESLVHRELFDNNSNVIRKVKFYQTNLTGFEVRGGLATKEKTFIGFRAIKKGEKLEYERIDVSNFEKMKKSNDGSFKVYKNDIVFFIFDEENYKGGKIVSFLDDKKMAAFSNPKYPANTQSQPESFLTMFQGKPKSHKQVSIGKAKGIIKLKVDILGNIESYQVLGDARSKILDDIKKYSE

SEQ ID NO: 3005 - protein, 1144 aa, unidentified
  REGION 1..1144: note = Description of Unknown: uncultivated organism sequence
  REGION 1..1144: note = Category: MG91 effectors
  REGION 1..1144: note = Description: MG91-197 effector
MVNLMSKKILSLDLGITSIGYSVLQEHSNDKYSLCDYGLSMFDKPLDKDGNSKKLLHSASISTTKLYALRKKRKQNLALVFENFQLASKTSLLEQEKNNQFINKWELRAKKVFEEKLEISELFTILYTLAKHRGYKSLDSGDLLEELCVELGIEIDNKGKKKEDDEKGKIKNALKTIESLREANPKKTVAQIIYEIEIQKVNPTFRNHDNYNYMIRREYINDEIKKIINTQEKFGLFSIAFNTKEFIKKIINAIDDQKDSTNDMSLFGRCQYYKEEIVAHQYSLLSDIFKMYESVANITFNAKPIVKITPKQLKLIADDFFKKIKKGKNIADIKYKDIRKILKLDDNVKIFNKEDSHFIKGKKQERSIIKFHFLNNLSKINNAFILDALEQENKYEILKKIFDVLAYEKAPHSIYEKLKEKIKDKKTIVDLIKYKAGSSMSISSYSMIQFIPHFEQGFTTDEIKKKLELDRKEDYSAFNKGIKYLHLKQFEEDDDLKINNHPVKYVVSATLRLIKYLHSVYGAFDEIRVESTRELSQNEQTKKDIEKANRALEKEIDAIVSNTEYQTIAQNYGKNLRKYARKILLWEEQERLDIYSGKVISVEDIFTNVVDLDHVVPRSLGGLSVKHNFVLAHRDTNVQKSNQLPLYFVMDKQAFINRVEYLFESHKINWKKKINLLANSLDDVYKDTFESKSLRATSYIEALTAQLLKRYYPFPDEKKQSDGSAVRHIQGRATSNIRKLLDVKMKVRDTNIHHAIDAILIGFTNQSWLQKLSNTFRENMGVIDDKARENIKKDFPIIELVINDEVKYVEPKELMELIEDNYNTFGEDSVFYKDIWGRVKTVNYWVSKKPMVSKIHKDTIYAKKGNGLYTNRENIINQFIALKITPTTNAEKFHENFEKKILKKMYLYKTNPKDVICQIVQNRAEDIATLLKSFIGVDSKNKELMSNAKSQLEALLHRELLDNNGNIIRKVKFYQTNLTGFDVRGGLATKEKTFIGFKSWLKDENLHYERIDVANIDTVKKENDSSFKVYKNDLVFFIYPDGSFRGGKIVSFLEENKTGAFQNSKFPMALKYQPSSFCEVDKQGKHTKTKPKSIGKAIGIIKLNLDIVGNIKSYQNIGNVNSECLEFLKENTDGWESSSSHKTL

SEQ ID NO: 3006 - protein, 510 aa, unidentified
  REGION 1..510: note = Description of Unknown: uncultivated organism sequence
  REGION 1..510: note = Category: MG91 effectors
  REGION 1..510: note = Description: MG91-198 effector
MFVVELPLKVEKWQSDVLNKRYELLAKIYNYAQKKLLRQYIYLTQMDEYKKCKTKKDKSVFFKNHPFYFKGITSKITFSEYDVTAFVEKIIKKNVSCDKTYKDFGINSSITEYLGKHIWSAWEKKIYDNGKKVSFKNKGELNTISIRKKSEYFGGLDADIEHMILSFNINGKKNSKAKKIILPINVKNLTEYEMYALKDGYDSINVVTIIRKMIRGKYKYYVQFTIKGEKPQKGRTLGKGNVGIDIGPSTVAISSLNGVTIDTLAEKCNNIEDKISDIERKMDRSRRATNPQNFTEDGQIKRINRKKGEIREWKYSKRYVKLRSKKQELLRKQAAIRKLQHNIKANEILSLGDTFIVENNPISAWAKRAKGVRKNKNGKIQTNKRFGKSIGNRAPSMFVTILQNKVKSLKGKFVPVNPKNAASRFDFTNGDFTEHNLDERKITLSNGNTHQRDMLAAFNLQHIDLTNDDLKKYNVDEMIEDYPIFCKLEKQEIKRFINGMKISNKSNIGI

SEQ ID NO: 3007 - protein, 795 aa, unidentified
  REGION 1..795: note = Description of Unknown: uncultivated organism sequence
  REGION 1..795: note = Category: MG91 effectors
  REGION 1..795: note = Description: MG91-199 effector
MEFKQKAFKELFSKGKQVTLNEFKNYLNNNGINIDEKSEISGVGKSSEMTRFNNKLSSYQVFHSVFGDKLEDKKYYDAAENIIYLGTIYADDKKTFKKAIEEKYGDFLTPDEIKRVSGLKFKDWGTLSAALFNLQGAEKSTGEVMTLIDALWNTQLNFMELINSDAFSYKEELEKYKKKGEGTIQNFKFEELNDYYFSAPVKRMIWQTVLIVREIEHVLGKPPVKMFVEVTRHDEEKEKIPPSRKDTFLSLYKNIKDESHDWKAIIEKADESGVIRSQKMYLYLSQMGRDLYTGKEIELDELFTTKYDIDHIIPQSLKKDDSILNNKVLTSKDFNNNIKQDNPLCEAIDDAHYAERKKLWDRLHNYNLINDEKYKRLTNRKGFSEEDLEGFIARQIVETSQAVLGVINIFKEIMPDTKIVFSKAKPVSDFRKDEIGWFKSRTLNDYHHAHDAYLNIVVGNVYNTKFTDNPRNFIKKERQKDLNPNYHMNKVFWYNVERGGKVAWIAGEDGTKKTVLKTLAKNSELMTRQSFEQTGGLCNQQITNKDDAGSGIGYLPVKMGEDISKYGGYAKISQSYFFLVEHTFKKKRIRTIETVPAYLKSQIESDPDALKRYCAEKLGLVDPDIRLRRINYQSLAKYNGFYVTICSKTGVRFNIANAVRLTLPKEWNNYIKKLEKTEGDEEITEEKNIELYDILTDKHLNSIFLKRPNPVGENLKNGREKFVSLSKKEQVSTLNNILLFTGFASAGKADISSIGGSKNAGAMAVSKNVNNADEFILIENSVTGIYSVRKDLKTI

SEQ ID NO: 3008 - protein, 1125 aa, unidentified
  REGION 1..1125: note = Description of Unknown: uncultivated organism sequence
  REGION 1..1125: note = Category: MG91 effectors
  REGION 1..1125: note = Description: MG91-200 effector
MKKKILSLDLGITSIGYSILDEMDNDRYALIDYGVSMFDKATDKDGKSKKLLHSASKSSTKLYDLRKSRIRKLANLFEKYGLGKAVELLKQEKENRFTNKWYLRAEKSFTKCLSVNELFSILYLMAKHRGYKSLDTDDLLEELLIELGFDVEEKKEKDAEKGKIKQALKTVESFRKKYPDKTVARIIYEIEIQKENPTFRNHDNYNYMIRREYINEEIAKIVKAQNDFGLFDKSIDIELFIKELILTIDDQKDSTNDMSLFGNCEYYPEHKVAHQYSLLSDIFKMYQSVANITFGKTKISKEQIKIVADDFFKKIKQGKNIGEIKYQDIRKVLKLSDEVQIFGKEDYRLDKKGKKVHHTIIRFHFLSSLGKMDNTFIKSIFKQENKLEILKEIFDVLEFEKAPRSIYKQVNEIFVKYALVDDKKLKDETIINLIKHKSGNSLNISAHAMIQFILYFAKGMTTDEIKKELKLERNEDYSNYMKGIKYLHVKSFEKDDNLEINNHPVKYVVSATMRLVKHLHAMYGAFDEIRVESTRELSQNEETKKAIDKANKEQEKRFQEILGNDEYQKIANHYNKNLKKYARKIMLWEEQEKLDIYSGKVIGFDDIFSNKVDIDHIIPQSLGGLSVKHNLVLAHRDENIKKSNQLPMHFVANKTEYINRVEYLFKEYRINWKKKINLLAETLDERYKDTFESKELRATSYIEALTAQMLKRYYPFPDKQKQANGQAVVHVQGRATSNIRKLLGVKTKVRDTNIHHAIDAILIGLTNKSWLQKLSNTFRENMGVIDDEARANIKKEIPLIEGVEPKELVELIEDAYNVYGEDSVFYKDIFGNTKTVNFWVSKKPMSSKIHKDTIYAKKPNGFFTVREDIIKQFIALKTTVTTDSETFKKNFEKKILQKMYLFKTNSNDVICKVVQSRADEVKNLLDSFVDIDTKNKESMSEAKEKLDSLIRKELLDNNGNVIRKVKFYQSNLKGFDIRGGLAIQEKTFIGFKATLKNKKLGYERIDASNFRKIQKINDGSFKVYKNDVVFFVYEDDNFKGGKIVSFLEDKKMGSFSNPRYPASIKFQPHSFLTLFKGVPNSHKQHSLNKAIGIIKLNLDILGNIKSYSKFGEVSKEVELKIFYKE

SEQ ID NO: 3009 - protein, 523 aa, unidentified
  REGION 1..523: note = Description of Unknown: uncultivated organism sequence
  REGION 1..523: note = Category: MG91 effectors
  REGION 1..523: note = Description: MG91-201 effector
MKSEKKNRCMEKEMFVVELPLKVEKWQSDVLNKRYELIAKIYNYAQKKLLRQYIYLVQMDEYKKCKTKKEKSIFFKNHPFYFKDITSKITFSEYDVTAFVEKIIKKNVSSDKTYKDFGINTSITECIGKHIWSAWEKKIYGNGKKVSLKNKGELNTISIRKKSEYFGGLDIDIEHMILSFNINGKTKSKAKKIILPINVKNLTEYEMYALKDGYDSINVVTIIRKMIRGNYKYYVQFTIEGEKPQKGRTLGNGNVGIDIGPSTVAISSLNGVTIDTLAEKCDNIESKISNIERKMDRSRRATNPQNFTEDGQIKRIDRKKGEKRVWKYSKRYVKLRNKKRELLRKQTVIRKLQHNIKANEILSLGDTFIVENNPISAWAKRANGVRKNKNGKIQTNKRFGKSIGNHAPAMFVTILQNKVESLKGKFVQVDLKNAASRFDFTNGDFTEHNLDERKITLSNGNTHQRDMLAAFNLQHIDLTNDDLKKYNVDEMIEDYPIFCKLEKEEIKRFIDKMKISNKSNIGL

SEQ ID NO: 3010 - protein, 510 aa, unidentified
  REGION 1..510: note = Description of Unknown: uncultivated organism sequence
  REGION 1..510: note = Category: MG91 effectors
  REGION 1..510: note = Description: MG91-202 effector
MFVVELPLKVEKWQSDVLNKRYELIAKIYNYAQKKLLRQYIYLVQMDEYKKCKTKKEKSIFFKNHPFYFKDITSKITFSEYDVTAFVEKIIKKNVSSDKTYKDFGINTSITECIGKHIWSAWEKKIYGNGKKVSLKNKGELNTISIRKKSEYFGGLDIDIEHMILSFNINGKTKSKAKKIILPINVKNLTEYEMYALKDGYDSINVVTIIRKMIRGNYKYYVQFTIEGEKPQKGRTLGNGNVGIDIGPSTVAISSLNGVTIDTLAEKCDNIESKISNIERKMDRSRRATNPQNFTEDGQIKRIDRKKGEKRVWKYSKRYVKLRNKKRELLRKQTVIRKLQHNIKANEILSLGDTFIVENNPISAWAKRANGVRKNKNGKIQTNKRFGKSIGNHAPAMFVTILQNKVESLKGKFVQVDLKNAASRFDFTNGDFTEHNLDERKITLSNGNTHQRDMLAAFNLQHIDLTNDDLKKYNVDEMIEDYPIFCKLEKEEIKRFIDKMKISNKSNIGL

SEQ ID NO: 3011 - protein, 514 aa, unidentified
  REGION 1..514: note = Description of Unknown: uncultivated organism sequence
  REGION 1..514: note = Category: MG91 effectors
  REGION 1..514: note = Description: MG91-203 effector
MEKEMFVVELPLKVEKWQSDVLNKRYELIAKIYNYAQKKLLRQYIYLVQMDEYKKCKTKKEKSIFFKNHPFYFKDITSKITFSEYDVTAFVEKIIKKNVSSDKTYKDFGINTSITECIGKHIWSAWEKKIYGNGKKVSLKNKGELNTISIRKKSEYFGGLDIDIEHMILSFNINGKTKSKAKKIILPINVKNLTEYEMYALKDGYDSINVVTIIRKMIRGNYKYYVQFTIEGEKPQKGRTLGNGNVGIDIGPSTVAISSLNGVTIDTLAEKCDNIESKISNIERKMDRSRRATNPQNFTEDGQIKRIDRKKGEKRVWKYSKRYVKLRNKKRELLRKQTVIRKLQHNIKANEILSLGDTFIVENNPISAWAKRANGVRKNKNGKIQTNKRFGKSIGNHAPAMFVTILQNKVESLKGKFVQVDLKNAASRFDFTNGDFTEHNLDERKITLSNGNTHQRDMLAAFNLQHIDLTNDDLKKYNVDEMIEDYPIFCKLEKEEIKRFIDKMKISNKSNIGL

SEQ ID NO: 3012 - protein, 523 aa, unidentified
  REGION 1..523: note = Description of Unknown: uncultivated organism sequence
  REGION 1..523: note = Category: MG91 effectors
  REGION 1..523: note = Description: MG91-204 effector
MKSEKKNRCMEKEMFVVELPLKVEKWQSDVLNKRYELIAKIYNYAQKKLLRQYIYLVQMDEYKKCKTKKEKSIFFKNHPFYFKDITSKITFSEYDVTAFVEKIIKKNVSSDKTYKDFGINTSITECIGKHIWSAWEKKIYGNGKKVSLKNKGELNTISIRKKSEYFGGLDIDIEHMILSFNINGKTKSKAKKIILPINVKNLTEYEMYALKDGYDSINVVTIIRKMIRGNYKYYVQFTIEGEKPQKGRTLGNGNVGIDIGPSTVAISSLNGVTIDTLAEKCDNIESKISNIERKMDRSRRATNPQNFTEYGQIKRIDRKKGEKRVWKYSKRYVKLRNKKRELLRKQTVIRKLQHNIKANEILSLGDTFIVENNPISAWAKRANGVRKNKNGKIQTNKRFGKSIGNHAPAMFVTILQNKVESLKGKFVQVDLKNAASRFDFTNGDFTEHNLDERKITLSNGNTHQRDMLAAFNLQHIDLTNDDLKKYNVDEMIEDYPIFCKLEKEEIKRFIDKMKISNKSNIGL

SEQ ID NO: 3013 - protein, 1353 aa, unidentified
  REGION 1..1353: note = Description of Unknown: uncultivated organism sequence
  REGION 1..1353: note = Category: MG91 effectors
  REGION 1..1353: note = Description: MG91-205 effector
MAVFKYYLGLDMGTNSVGWAVTDIQYNILKVKGKDLWGIREFNEASTAVERRTHRVSRRARQRKTVLIGLLKYYFHDEICKKDPYFFQRLDNSKYHLEDKDDEVKCTYNIFNDINYTDADYFKQYPTIFHLRNELIINPNEHDIRLVYLALLNMFKHRGHFLNDSLIDDGSEMKIDEAYLELANLLSEYTEYYLKTDVNITELENILSDRDESRTKKSEKIVELLEIDSKNKPYKEMIRGLCGLKFNAITIFSDVQLEDGQKLDICLSDASFEEKADDIASILGEDYFQIILSMKRLYDIGSLSEIMKGYSYLSEARVASYKKHKEDLCCLKRVIKKYCNKECYEKIFNSDEDGSYASYVGSFNSNSKQRRVGNKRSIEDLYKEIKKILKAVPQEDADVQRILTSIDNETFLPKQLTASNGVIPNQIHEKEMKKILSNAENYLPFLKEKDEKNQTVSERILMLFTFRIPYYVGPTTENSQKNGGNGWVIRKEAGQVLPWNIEEKIDMKATSEAFISRMIRRCTYISGKPVLPRASLEYQSFCVLNAINNITIDGYRISVELKQDIYNDLFLKGKKVTKKQLCKYLYLRGLITSENQVSGIDIEINNTLSTYKIFKNIFGDDIIYDRTKIMIEDIVFWCTVYGESKKFLRERLCEKYGDKLSQDQIKRILGLKFKDWGNLSKEFLELSGVNKKTNESMSIIKALWENNLNMMELINSDLFDFKEKIVEYQTDLMKTIYNIEVDDLENYYFSAPVKRMVWQTILVVKELVGVLGCEPTRIFIEMTRRHDEITKRTINRKKKFEALYKSVKDEDTDWMNVIADADDTGRIRSKKMYLYLTQKGRCMYTGKHIELSDLFNNNLYDIDHIYPRHFVKDDNIDNNLVLVCKEKNAHKRDIYPLEEQIYSSQKGMWSELKKLGFINEEKYNRLTGRNSFTDEQKAGFIARQLVETSQGTKGVANILQQLLPESKIVYAKASNVSEFRQSRDIPKSRLVNEFHHAHDAYLNIVVGNVYYVKFTQDPLKFIRNDYDKDKINNNYNLSKMFDWDVKRKGEVAWIAQKKNGDVGTIATVKKVLSKNTPLMTRYCFEGRGKISKEERHSAKKAKQVGYLPYKTSDLKIKDVTKYGGFTSITVAYYFVVEHDEKKKRIRTIESVPLYLAAKINSNHEELDKYCKNELGLVNFNIRVRKIRIGSLLKQNGYFFYITGKTGNRLIVRNAVNICFRKEWIKYSSKIEKYQEKKIIDDIITKDKNELFYDEFIKKYENSIFANRPNSILEKLKKAFPVFKESNIEQQCSILYQLLNLSKILGSECDLRLIGESPNCGKMLINKKIGDDDIYLINQSVTGLYENKINLRTV

SEQ ID NO: 3014 - protein, 1352 aa, unidentified
  REGION 1..1352: note = Description of Unknown: uncultivated organism sequence
  REGION 1..1352: note = Category: MG91 effectors
  REGION 1..1352: note = Description: MG91-206 effector
MQEKPYYLGLDMGTNSVGWAVTDQHYNLLKAKGKDLWGIREFIEADTSVERRTHRISRRRRQREQARIGLLNDYFHDAIIAIDPSFFQRLENSKYHLEDKDQNVRYKYNIFNDPDYTDADYYTQYPTIYHLRKELLENPKPHDVRLVYLALLNMFKHRGHFLNSGISDGNNERSLKDAYINFAISVSELTEDYFNQDVDYSTIEGILSSRDLNRTKKAEELSTVLGIDFKNKKYKEYLRAICGLKINAYTLFSDQLPDDTTKIDLCVSDASFDEKSEELVSLIGEDLFQIILNIKEIYDIGSLAGILKGYTYLSQARVAAYDKHKHDLKLLKSSIKKYCTKEEYNNFFNSDADGSYASYIGSFNSGNKERRVGSKRTSEDLYKEIKKLLKGANKSDPAINEIFTSIETESFLPKQLTASNGIIPNQVHSKEMARILTNAENYLPFLKETDENNLSISNRILQLYKFQIPYYIGPVTEKSQRDGGNGWVIRKDNGRVFPWNIEEKIDVKATSEAFISRMVRRCTYMNGKQVLPKASLEYESFRVLNEINNLRIDGERIPVTLKQDIYTDLFQKGKKVTKKQLCNYLATRGLIESSEQVTGIDIAINNSLSTYGKFKAIFGEDIKLDHIQHMIEDIVFWCTVYGDSKQFLKEQIEDKYKGKLSPEQMKRILGFKFKDWGNLSKEFFELKGADKSTGEAVSIIRALWENNLNLMELINSPEFDFKEQLADYEANSLKTLSDFEPEDLNDYYFSAPVRRMIWQTTLIIKELVHVLGKEPARIFIEMTREKDASRGRTLSRKKKFEDLYKNVKDENTDWAKVIEHADESGTIRSKKMYLYLTQKGRCMYTGNHIELSDLFNDNLYDIDHIYPRHFVKDDNIDNNLVLVTKEKNAHKSDNYPLEAEIFNKQRNMWTQLRKEGFISEEKYNRLMGRNAFTDEQKAGFIARQLVETSQGTKGVAELFHQLLPNSKIVYAKAGNVSDFRRNREFPKSRLVNDFHHAHDAYLNIVVGNVYYVKFTQNPINYIKNSYNKDMNKNNYNLSRMFDWDVKRGDEVAWIAQKQDGAAGTISTVKKMLSKNTPLMTRLSYEGKGALANETLYSAEKAKGEGYIPFKSSDTKIQDVTKYGGFTSVTGAYFFLVEHDEKKKRIRTIESVPLYLADKIDKDSSELERYCDKLGLVNYDVRVRKIKIGSLIKYNGYFCYITGKTGYRLIVRNATNLCLASNWRKYIKKIEKYKETTIIDNVITAEENIKLYNELLNKFTVGIFGRRPNPIGEKMDSARDKFASLSIENQCLALYQILQLTAILGNESDLQLIGASTHAGKMLISKKIGTDEIYLINQSPTGLFETKIDLQTI

SEQ ID NO: 3015 - protein, 1352 aa, unidentified
  REGION 1..1352: note = Description of Unknown: uncultivated organism sequence
  REGION 1..1352: note = Category: MG91 effectors
  REGION 1..1352: note = Description: MG91-207 effector
MQEKPYYLGLDMGTNSVGWAVTDQHYNLLKAKGKDLWGIREFIEADTSVERRTHRISRRRRQREQARIGLLNDYFHDAIIAIDPSFFQRLENSKYHLEDKDQNVRYKYNIFNDPDYTDADYYTQYPTIYHLRKELLENPKPHDVRLVYLALLNMFKHRGHFLNSGISDGNNERSLKDAYINFAISVSELTEDYFNQDVDYSTIEGILSSRDLNRTKKAEELSTVLGIDFKNKKYKEYLRAICGLKINAYTLFSDQLPDDTTKIDLCVSDASFDEKSEELVSLIGEDLFQIILNIKEIYDIGSLAGILKGYTYLSQARVAAYDKHKHDLKLLKSSIKKYCTKEEYNNFFNSDADGSYASYIGSFNSGNKERRVGSKRTSEDLYKEIKKLLKGANKSDPAINEIFTSIETESFLPKQLTASNGIIPNQVHSKEMARILTNAENYLPFLKETDENNLSISNRILQLYKFQIPYYIGPVTEKSQRDGGNGWVIRKDNGRVFPWNIEEKIDVKATSEAFISRMVRRCTYMNGKQVLPKASLEYESFRVLNEINNLRIDGERIPVTLKQDIYTDLFQKGKKVTKKQLCNYLATRGLIESSEQVTGIDIAINNSLSTYGKFKAIFGEDIKLDHIQHMIEDIVFWCTVYGDSKQFLKEQIEDKYKGKLSPEQMKRILGFKFKDWGNLSKEFFELKGADKSTGEAVSIIRALWENNLNLMELINSSEFDFKEQLADYEANSLKTLSDFEPEDLNDYYFSAPVRRMIWQTTLIIKELVHVLGKEPARIFIEMTREKDASRGRTLSRKKKFEDLYKNVKDENTDWAKVIEHADESGTIRSKKMYLYLTQKGRCMYTGNHIELSDLFNDNLYDIDHIYPRHFVKDDNIDNNLVLVTKEKNAHKSDNYPLEAEIFNKQRNMWTQLRKEGFISEEKYNRLMGRNAFTDEQKAGFIARQLVETSQGTKGVAELFHQLLPNSKIVYAKAGNVSDFRRNRELPKSRLVNDFHHAHDAYLNIVVGNVYYVKFTQNPINYIKNSYNKDMNKNNYNLSRMFDWDVKRGDEVAWIAQKQDGAAGTISTVKKMLSKNTPLMTRLSYEGKGALANETLYSAEKAKGEGYIPFKSSDTKIQDVTKYGGFTSVTGAYFFLVEHDEKKKRIRTIESVPLYLADKIDKDSSELERYCDKLGLVNYDVRVRKIKIGSLIKYNGYFCYITGKTGYRLIVRNATNLCLTSNWRKYIKKIEKYKETTIIDNVITAEENIKLYNELLNKFTVGIFGRRPNPIGEKMDSARDKFASLSIENQCLALYQILQLTAILGNESDLQLIGASTHAGKMLISKKIGTDEIYLINQSPTGLFETKIDLQTI

SEQ ID NO: 3016 - protein, 1352 aa, unidentified
  REGION 1..1352: note = Description of Unknown: uncultivated organism sequence
  REGION 1..1352: note = Category: MG91 effectors
  REGION 1..1352: note = Description: MG91-208 effector
MLEKPYYLGLDMGTNSVGWAVTDQHYNLLKAKGKDLWGIREFTEADTSVERRTHRISRRRRQREQARIGLLNDYFHDAIIAIDPSFFQRLENSKYHLEDKDQNVRYKYNIFNDPDYTDVDYYVQYPTIYHLRKELLENPKPHDVRLVYLALLNMFKRRGHFLNAGISDGNNERSLKDAYINFAISVSELTEDYFNQDVDYSAIEEILSSRDLNRTKKAEELSTVLGIDFKNKKYKEYLRAICGLKINAYTLFSDQLPDDTTKIDLCVSDASFEEKSEELVSLIGEDLFQIILNIKEIYDIGSLTGILKGYTYLSQARVATYDKHKHDLKLLKSSIKKYCTKEEYNNFFNSDADGSYASYIGSFNSGNKKRRVGSKRTSEDLYKEIKKLLKDANKSDPAINEIFTSIETESFLPKQLTASNGIIPNQVHSKEMAKILSNAENYLPFLKDTDENNLSISNRILQLYKFQIPYYIGPVTEKSQRDGGNGWVIRKDNGRVLPWNIEEKIDVKATSETFISRMVRRCTYMNGKQVLPKASLEYESFRVLNEINNLRIDGERIPVALKQDIYTDLFQKGKKVTKKQLCNYLVTRGLIESSEQVTGIDIAINNSLSTYGKFKAILGEDIKLDHIQHMIEDIVFWCTVYGDSKQFLKEQIEDKYKEKLSPEQMKRILGFKFKDWGNLSKEFFELKGADKSTGEAISIIRALWENNLNLMELINSPEFDFKERLTDYQTNSLKTLSDFEPEDLNEYYFSAPVRRMIWQTTSIIKELVHVLGKEPARIFIEMTREKDASRGRTLSRKKKFEDLYKNVKDENTDWAKVIEHADESGTIRSKKMYLYLTQKGKCMYTGKHIELSDLFNDNLYDIDHIYPRHFVKDDNIDNNLVLVTKEKNAHKSDNYPLEAEIFNKQRNMWTQLRKEGFISEEKYNRLMGRNAFTDEQKAGFIARQLVETSQGTKGVAELFHQLLPNSKIVYAKAGNVSDFRRNRELPKSRLVNDFHHAHDAYLNIVVGNVYYVKFTQNPINYIKNSYNKDMDKNNYNLSRMFDWDVKRGDEVAWIAQKKDGTAGTISTVKKMLSKNTPLMTRLSYEGKGALANETLYSAEKAKGEGYIPFKSSDAKIQDVTKYGGFTSVTGAYFFLVEHDEKKKRIRTIESVPLYLADRIDKDSSELERYCDKLGLVNYDIRVRKIKIGSLINRNGYFAYLTGKTGKQLILRNATSLCLDKKWTIYIKKIEKYKETKVLDSIITSETTVNLYNELLNKFTVGIYGRRPNPIGEKMDSARDKFASLSIENQCLALYQILQLSAILGNESDLQLIGASTHAGKMLISRKIGTDEIYLINQSPTGLFETKIDLQTI

SEQ ID NO: 3017 - protein, 1359 aa, unidentified
  REGION 1..1359: note = Description of Unknown: uncultivated organism sequence
  REGION 1..1359: note = Category: MG91 effectors
  REGION 1..1359: note = Description: MG91-209 effector
MLNTPYYLGLDMGTNSVGWAVTDKNYNLLRAKGKDLWGIREFSDSATSVDRRSYRIRRRRRQREQARIGLLKYYFNDSIIAKDPSFFQRLENSKYHLEDKDEAVKYKFNIFNDKTYTDIDYYTQYPTIYHLRKELLESSEPHDVRLVYLALLNMFKHRGHFLNAEIGDVAEERKLKDAYIDFCSCVSELTNESFNLDIDYSAVEEILSSRDISRTKKSEALASILNIDVKNKKYKEYVKAICGLKVNAYTLFSEQLSDEVKRIDICVSDASFDTKREDYISILGEDLFQIILYIKEIYDIGSLAGILKGYSYLSFARVATYEKHKSDLRKLKDCIRKYCSKEDYNQFFNSDAAGFYASYIGSFNSGKKQRRVGKNTTSEDLYKEIKKILKNADKNDPAIIDIFSSIDTESFLPKQLTASNGVIPNQVHYKEMAKILSNAESYLPFLREKNESNLSVSERILQIYKFQIPYYIGPVTEKSHRDGGNGWVIRKSNGRVLPWNINEKIDVKATSEAFISRMVRRCTYMNGAQVLPKASLEYESFRVLNEINNLRIDGERIPVDLKQAIYIDIFQKGKKITADILHKYLFNKGYIQSSEQVTGIDININNSLSTYGKFKVIFGEDIKLDSVQHMIEDIVFWCTVYGDSKKFLQEQIEEKYSDKISKEQLKRILGFKFKDWGSLSKEFFELKATDKSTGENISIIRALWENNLNLMELINSSKFNFKERLEEYRITSLKTLSDFEPEDLREYYFSAPVRKMIWQTMLVIKELVHVLGHEPERIFIEIPRDKDPSIGRTISRKKKFEELYKNVKDESVDWMNVIEHADDSGSLRSKKMYLYLTQKGRCMYTGEHIELSDLFNKSLYDIDHIYPRHFVKDDNIDNNLVLVKREKNAHKSDNYPLEAEIFNNQKKMWAQLRKEDFINEEKYKRLMGRNPFTDEQKAGFIARQLVETQQGTKGVAELLQQLLPNSKIVYTKAGNVSDFRHSREIPKSRLINDFHHAHDAYLSIVVGNVYYVKFTQNPINFIKNAYNKDSSKNNYNLTRMFDWDVKRRDEVAWIAQNKNGTVGTIAIVKKMLKRNTPLMTRLSYEGKGGLTKETLYSAEKAKGEGYIPFKSSDKKMQDVTKYGGFTSVKGAYFFLVEHDEKKKQIRTIESVPLYLADKIEKDPAELERYCQKLGLVNYNIRVRKIKIGTLIKRNGYFAYLTGKTGKQLILRNATNLCLDSKWGTYIKKIEKYKDTGVLDNTLDTDTNIKLYNELLDKFTTGIYGKRPNPIGDKMLSAKNTFTSFTLDNQCNLIYQILQLSKILGFETDLSLLHTNKKSDKPTREGGMQISKKVSNTTSMYLINQSPTGLFEKQIDLLTV

SEQ ID NO: 3018 - protein, 1352 aa, unidentified
  REGION 1..1352: note = Description of Unknown: uncultivated organism sequence
  REGION 1..1352: note = Category: MG91 effectors
  REGION 1..1352: note = Description: MG91-210 effector
MQEKPYYLGLDMGTNSVGWAVTDQHYNLLKAKGKDLWGIREFIEADTSVERRTHRISRRRRQREQARIGLLNDYFHDAIIAIDPSFFQRLENSKYHLEDKDQNVRYKYNIFNDPDYTDADYYTQYPTIYHLRKELLENPKPHDVRLVYLALLNMFKHRGHFLNSGISDGNNERSLKDAYINFAISVSELTEDYFNQDVDYSTIEGILSSRDLNRTKKAEELSTVLGIDFKNKKYKEYLRAICGLKINAYTLFSDQLPDDTTKIDLCVSDASFDEKSEELVSLIGEDLFQIILNIKEIYDIGSLAGILKGYTYLSQARVAAYDKHKHDLKLLKSSIKKYCTKEEYNNFFNSDADGSYASYIGSFNSGNKERRVGSKRTSEDLYKEIKKLLKGANKSDPAINEIFTSIETESFLPKQLTASNGIIPNQVHSKEMARILTNAENYLPFLKETDENNLSISNRILQLYKFQIPYYIGPVTEKSQRDGGNGWVIRKDNGRVFPWNIEEKIDVKATSEAFISRMVRRCTYMNGKQVLPKASLEYESFRVLNEINNLRIDGERIPVTLKQDIYTDLFQKGKKVTKKQLCNYLATRGLIESSEQVTGIDITINNSLSTYGKFKAIFGEDIKLDHIQHMIEDIVFWCTVYGDSKQFLKEQIEDKYKGKLSPEQMKRILGFKFKDWGNLSKEFFELKGADKSTGEAVSIIRALWENNLNLMELINSPEFDFKEQLADYEANSLKTLSDFEPEDLNDYYFSAPVRRMIWQTTLIIKELVHVLGKEPARIFIEMTREKDASRGRTLSRKKKFEDLYKNVKDENTDWAKVIEHADESGTIRSKKMYLYLTQKGRCMYTGNHIELSDLFNDNLYDIDHIYPRHFVKDDNIDNNLVLVTKEKNAHKSDNYPLEAEIFNKQRNMWTQLRKEGFISEEKYNRLMGRNAFTDEQKAGFIARQLVETSQGTKGVAELFHQLLPNSKIVYAKAGNVSDFRRNREFPKSRLVNDFHHAHDAYLNIVVGNVYYVKFTQNPINYIKNSYNKDMNKNNYNLSRMFDWDVKRGDEVAWIAQKQDGAAGTISTVKKMLSKNTPLMTRLSYEGKGALANETLYSAEKAKGEGYIPFKSSDTKIQDVTKYGGFTSVTGAYFFLVEHDEKKKRIRTIESVPLYLADKIDKDSSELERYCDKLGLVNYDVRVRKIKIGSLIKYNGYFCYITGKTGYRLIVRNATNLCLASNWRKYIKRIEKYKETTIIDNVITAEENIKLYNELLNKFTVGIFGRRPNPIGEKMDSARDKFASLSIENQCLALYQILQLTAILGNESDLQLIGASTHAGKMLISKKIGTDEIYLINQSPTGLFETKIDLQTI

SEQ ID NO: 3019 - protein, 1359 aa, unidentified
  REGION 1..1359: note = Description of Unknown: uncultivated organism sequence
  REGION 1..1359: note = Category: MG91 effectors
  REGION 1..1359: note = Description: MG91-211 effector
MLEKPYYLGLDMGTNSVGWAVTDQQYNLLKAKGKDLWGIREFAEADTSVERRTHRISRRRRQREQARIGLLNDYFHDAIIAIDPSFFQRLENSKYHLEDKDQNVRYKYNIFNDPDYTDADYYTQYPTIYHLRKELLENPKPHDVRLVYLALLNMFKHRGHFLNSGISDGNNERSLKDAYINFAISVSELTEDYFNQDVDYSTIEGILSSRDLNRTKKAEELSTVLGIDFKNKKYKEYLRAICGLKINAYTLFSDQLPDDTTKIDLCVSDASFDEKSEELVSLIGEDLFQIILNIKEIYDIGSLAGILKGYTYLSQARVAAYDKHKHDLKLLKSSIKKYCTKEEYNNFFNSDADGSYASYIGSFNSGNKERRVGSKRTSEDLYKEIKKLLKGANKSDPAINEIFTSIETESFLPKQLTASNGIIPNQVHSKEMARILTNAENYLPFLKETDENNLSISNRILQLYKFQIPYYIGPVTEKSQRDGGNGWVIRKDNGRVFPWNIEEKIDVKATSEAFISRMVRRCTYMNGKQVLPKASLEYESFRVLNEINNLRIDGERIPVTLKQDIYTDLFQKGKKVTKKQLCNYLATRGLIESSEQVTGIDIAINNSLSTYGKFKAIFGEDIKLDHIQHMIEDIVFWCTVYGDSKQFLKEQIEDKYKGKLSPEQMKRILGFKFKDWGNLSKEFFELKGADKSTGEAVSIIRALWENNLNLMELINSPEFDFKEQLADYEANSLKTLSDFEPEDLNDYYFSAPVRRMIWQTTLIIKELVHVLGKEPARIFIEMTREKDASRGRTLSRKKKFEDLYKNVKDENTDWAKVIEHADESGTIRSKKMYLYLTQKGRCMYTGNHIELSDLFNDNLYDIDHIYPRHFVKDDNIDNNLVLVTKEKNAHKSDNYPLEAEIFNKQRNMWTQLRKEGFISEEKYNRLMGRNAFTDEQKAGFIARQLVETSQGTKGVAELFHQLLPNSKIVYAKAGNVSDFRRNRELPKSRLVNDFHHAHDAYLNIVVGNVYYVKFTQNPINYIKNSYNKDMNKNNYNLSRMFDWDVKRGDEVAWIAQKQDGATGTISTVKKMLSKNTPLMTRLSYEGKGALANETLYSAEKAKGEGYIPFKSSDTKIQDVTKYGGFTSVTGAYFFLVEHDEKKKRIRTIESVPLYLADKIDKDSSELERYCDKLGLVNYDIRVRKIKIGSLLNRNGYFAYLTGKTGKQLILRNATNLCLDKKWTRYIKKIEKYKETNVLDSIITSETMVNLYNELLNKFTVGIYGRRPNPIGEKMDSAKNTFTSYTLDNQCNLIYQILQLSKILGFETDLSLLRTNKQSGKPTREGGMQISKKIDNTTSMYLINQSPTGLFETKIDLQTI

SEQ ID NO: 3020 - protein, 1352 aa, unidentified
  REGION 1..1352: note = Description of Unknown: uncultivated organism sequence
  REGION 1..1352: note = Category: MG91 effectors
  REGION 1..1352: note = Description: MG91-212 effector
MQEKPYYLGLDMGTNSVGWAVTDQHYNLLKAKGKDLWGIREFIEADTSVERRTHRISRRRRQREQARIGLLNDYFHDAIIAIDPSFFQRLENSKYHLEDKDQNVRYKYNIFNDPDYTDADYYTQYPTIYHLRKELLENPKPHDVRLVYLALLNMFKHRGHFLNSGISDGNNERSLKDAYINFAISVSELTEDYFNQDVDYSTIEGILSSRDLNRTKKAEELSTVLGIDFKNKKYKEYLRAICGLKINAYTLFSDQLPDDTTKIDLCVSDASFDEKSEELVSLIGEDLFQIILNIKEIYDIGSLAGILKGYTYLSQARVAAYDKHKHDLKLLKSSIKKYCTKEEYNNFFNSDADGSYASYIGSFNSGNKERRVGSKRTSEDLYKEIKKLLKGANKSDPAINEIFTSIETESFLPKQLTASNGIIPNQVHSKEMARILTNAENYLPFLKETDENNLSISNRILQLYKFQIPYYIGPVTEKSQRDGGNGWVIRKDNGRVFPWNIEEKIDVKATSEAFISRMVRRCTYMNGKQVLPKASLEYESFRVLNEINNLRIDGERIPVTLKQDIYTDLFQKGKKVTKKQLCNYLATRGLIESSEQVTGIDIAINNSLSTYGKFKAIFGEDIKLDHIQHMIEDIVFWCTVYGDSKQFLKEQIEDKYKGKLSPEQMKRILGFKFKDWGNLSKEFFELKGADKSTGESVSIIRALWENNLNLMELINSSEFDFKEQLADYEANSLKTLSDFEPEDLNDYYFSAPVRRMIWQTTLIIKELVHVLGKEPARIFIEMTREKDASRGRTLSRKKKFEDLYKNVKDENTDWAKVIEHADESGTIRSKKMYLYLTQKGRCMYTGNHIELSDLFNDNLYDIDHIYPRHFVKDDNIDNNLVLVTKEKNAHKSDNYPLEAEIFNKQRNMWTQLRKEGFISEEKYNRLMGRNAFTDEQKAGFIARQLVETSQGTKGVAELFHQLLPNSKIVYAKAGNVSDFRRNRELPKSRLVNDFHHAHDAYLNIVVGNVYYVKFTQNPINYIKNSYNKDMNKNNYNLSRMFDWDVKRGDEVAWIAQKQDGAAGTISTVKKMLSKNTPLMTRLSYEGKGALANETLYSAEKAKGEGYIPFKSSDTKIQDVTKYGGFTSVTGAYFFLVEHDEKKKRIRTIESVPLYLADKIDKDSSELERYCDKLGLVNYDVRVRKIKIGSLIKYNGYFCYITGKTGYRLIVRNATNLCLTSNWRKYIKKIEKYKETTIIDNVITAEENIKLYNELLNKFTVGIFGRRPNPIGEKMDSARDKFASLSIENQCLALYQILQLTAILGNESDLQLIGASTHAGKMLISKKIGTDEIYLINQSPTGLFETKIDLQTI

SEQ ID NO: 3021 - protein, 1352 aa, unidentified
  REGION 1..1352: note = Description of Unknown: uncultivated organism sequence
  REGION 1..1352: note = Category: MG91 effectors
  REGION 1..1352: note = Description: MG91-213 effector
MQEKPYYLGLDMGTNSVGWAVTDQHYNLLKAKGKDLWGIREFIEADTSVERRTHRISRRRRQREQARIGLLNDYFHDAIIAIDPSFFQRLENSKYHLEDKDQNVRYKYNIFNDPDYTDADYYTQYPTIYHLRKELLENPKPHDVRLVYLALLNMFKHRGHFLNSGISDGNNERSLKDAYINFAISVSELTEDYFNQDVDYSTIEGILSSRDLNRTKKAEELSTVLGIDFKNKKYKEYLRAICGLKINAYTLFSDQLPDDTTKIDLCVSDASFDEKSEELVSLIGEDLFQIILNIKEIYDIGSLAGILKGYTYLSQARVAAYDKHKHDLKLLKSSIKKYCTKEEYNNFFNSDADGSYASYIGSFNSGNKERRVGSKRTSEDLYKEIKKLLKGANKSDPAINEIFTSIETESFLPKQLTASNGIIPNQVHSKEMARILTNAENYLPFLKETDENNLSISNRILQLYKFQIPYYIGPVTEKSQRDGGNGWVIRKDNGRVFPWNIEEKIDVKATSEAFISRMVRRCTYMNGKQVLPKASLEYESFRVLNEINNLRIDGERIPVTLKQDIYTDLFQKGKKVTKKQLCNYLATRGLIESSEQVTGIDIAINNSLSTYGKFKAIFGEDIKLDHIQHMIEDIVFWCTVYGDSKQFLKEQIDDKYKGKLSPEQMKRILGFKFKDWGNLSKEFFELKGADKSTGEAVSIIRALWENNLNLMELINSSEFDFKEQLADYEANSLKTLSDFEPEDLNDYYFSAPVRRMIWQTTLIIKELVHVLGKEPARIFIEMTREKDASRGRTLSRKKKFEDLYKNVKDENTDWAKVIEHADESGTIRSKKMYLYLTQKGRCMYTGNHIELSDLFNDNLYDIDHIYPRHFVKDDNIDNNLVLVTKEKNAHKSDNYPLEAEIFNKQRNMWTQLRKEGFISEEKYNRLMGRNAFTDEQKAGFIARQLVETSQGTKGVAELFHQLLPNSKIVYAKAGNVSDFRRNRELPKSRLVNDFHHAHDAYLNIVVGNVYYVKFTQNPINYIKNSYNKDMNKNNYNLSRMFDWDVKRGDEVAWIAQKQDGAAGTISTVKKMLSKNTPLMTRLSYEGKGALANETLYSAEKAKGEGYIPFKSSDTKIQDVTKYGGFTSVTGAYFFLVEHDEKKKRIRTIESVPLYLADKIDKDSSELERYCDKLGLVNYDVRVRKIKIGSLIKYNGYFCYITGKTGYRLIVRNATNLCLTSNWRKYIKKIEKYKETTIIDNVITAEENIKLYNELLNKFTVGIFGRRPNPIGEKMDSARDKFASLSIENQCLALYQILQLTAILGNESDLQLIGASTHAGKMLISKKIGTDEIYLINQSPTGLFETKIDLQTI

SEQ ID NO: 3022 - protein, 1359 aa, unidentified
  REGION 1..1359: note = Description of Unknown: uncultivated organism sequence
  REGION 1..1359: note = Category: MG91 effectors
  REGION 1..1359: note = Description: MG91-214 effector
MLEKPYYLGLDMGTNSVGWAVTDQQYNLLKAKGKDLWGIREFAEADTSVERRTHRISRRRRQREQARIGLLNDYFHDAIIAIDPSFFQRLENSKYHLEDKDQNVRYKYNIFNDPDYTDADYYTQYPTIYHLRKELLENPKPHDVRLVYLALLNMFKHRGHFLNSGISDGNNERSLKDAYINFAISVSELTEDYFNQDVDYSTIEGILSSRDLNRTKKAEELSTVLGIDFKNKKYKEYLRAICGLKINAYTLFSDQLPDDTTKIDLCVSDASFDEKSEELVSLIGEDLFQIILNIKEIYDIGSLAGILKGYTYLSQARVAAYDKHKHDLKLLKSSIKKYCTKEEYNNFFNSDADGSYASYIGSFNSGNKERRVGSKRTSEDLYKEIKKLLKGANKSDPAINEIFTSIETESFLPKQLTASNGIIPNQVHSKEMARILTNAENYLPFLKETDENNLSISNRILQLYKFQIPYYIGPVTEKSQRDGGNGWVIRKDNGRVFPWNIEEKIDVKATSEAFISRMVRRCTYMNGKQVLPKASLEYESFRVLNEINNLRIDGERIPVTLKQDIYTDLFQKGKKVTKKQLCNYLATRGLIESSEQVTGIDIAINNSLSTYGKFKAIFGEDIKLDHIQHMIEDIVFWCTVYGDSKQFLKEQIEDKYKGKLSPEQMKRILGFKFKDWGNLSKEFFELKGADKSTGEAVSIIRALWENNLNLMELINSPEFDFKEQLADYEANSLKTLSDFEPEDLNDYYFSAPVRRMIWQTTLIIKELVHVLGKEPARIFIEMTREKDASRGRTLSRKKKFEDLYKNVKDENTDWAKVIEHADESGTIRSKKMYLYLTQKGRCMYTGNHIELSDLFNDNLYDIDHIYPRHFVKDDNIDNNLVLVTKEKNAHKSDNYPLEAEIFNKQRNMWTQLRKEGFISEEKYNRLMGRNAFTDEQKAGFIARQLVETSQGTKGVAELFHQLLPNSKIVCAKAGNVSDFRRNRELPKSRLVNDFHHAHDAYLNIVVGNVYYVKFTQNPINYIKNSYNKDMNKNNYNLSRMFDWDVKRGDEVAWIAQKQDGATGTISTVKKMLSKNTPLMTRLSYEGKGALANETLYSAEKAKGEGYIPFKSSDTKIQDVTKYGGFTSVTGAYFFLVEHDEKKKRIRTIESVPLYLADKIDKDSSELERYCDKLGLVNYDIRVRKIKIGSLLNRNGYFAYLTGKTGKQLILRNATNLCLDKKWTRYIKKIEKYKETNVLDSIITSETMVNLYNELLNKFTVGIYGRRPNPIGEKMDSAKNTFTSYTLDNQCNLIYQILQLSKILGFETDLSLLRTNKQSGKPTREGGMQISKKIDNTTSMYLINQSPTGLFETKIDLQTI

SEQ ID NO: 3023 - protein, 1147 aa, unidentified
  REGION 1..1147: note = Description of Unknown: uncultivated organism sequence
  REGION 1..1147: note = Category: MG91 effectors
  REGION 1..1147: note = Description: MG91-215 effector
MSRTRKAEGLAEILGVDYKNKPYKELIRGLCGLKFNACAIFPEIQSDEVPKLDICLSEASFDEKSDEIANILGEDYFEIIMAMKDIYDIGSLAGIRKGYNYLSQARVASYERHKEDLKLLKEVIKKYCSKDDYDSFFNSDADGSYASYVGSYNSKTKQRRVGNKRSSEELYKAIKKLFKNVPVEDADVQSILTSIENETFLPKQLTVSNGVIPNQVHAEEMKKILSNAENYLPFLKEKDETGLSVSEKILKLFSFQIPYYVGPTTEKSNKDGGNGWVVRKEEGQVLPWNIDEKIDMKATSEAFISRMVRRCTYISGELVLPKSSLEYQSFCVLNEINNIKIDGERISVELKQDIYKEVFQKGKRVTKKQLCKYLHTRGIIEAEEQVTGIDVTINNALTTYGKFKAILGDDISKDSVQKMIEDIVFWCTVYGDSKKFLKDRIEEKYGEKLTKEQIKRIIGFKFKDWGNLSKNFLELSGADVSTGESVSIIRALWNDNLNLMELINSRLYNYKERLAECQNTMMKTLSDIEAEDLDEYYFSAPVKRMIWQTILIIKELVKVLGCEPDRIFVEMTRRPDERKMRTESRRKKFEELYKKVKDEDVDWMKVIAHADETGSIRSKKMYLYLTQKGRCMYTGKHIELSDLFNNNLYDIDHIYPRHFVKDDNIDNNLVLVCKEKNAHKSDIYPLEDEILASQKNMWSELRRSELRRSGFITEEKYNRLIGRNPFTDEQKAGFIARQLVETSQGTKGVANILQQLLPESKIVYAKASNVSEFRNTRDIPKSRLINEFHHAHDAYLNIVVGNVYYVKFTQNPLNFIKNDYDRDKTKNNYNLSKMFDWDVERNGEVAWIAQKKDGEAGTIATVKKVLERNTPLMTRYSFEKKGRLTKEERHSAIDAKKDQYLPFKTSDSKMQDVTKYGGFNDIAGTYFFLVEHTEKKNRIRTIESVPLYIAKKIDQNPIELEKYCEQVLGLVDFDIRVRKIKIGSLIKRNNYFCYITGKKPGRLIVRNAVNLCLKNEWIKYISKLEKYNEKNVIDEMITKEKNQLLYLELINKFRNSIFSKRPNGIGKKLEDARNIFNDLSTEEQCIVLYKVLQLSAVMGYEADLSLIKYSKSAGAMQISKKIGDEDIYLINQSVTGLYEKKINLRTV

SEQ ID NO: 3024 - protein, 1359 aa, unidentified
  REGION 1..1359: note = Description of Unknown: uncultivated organism sequence
  REGION 1..1359: note = Category: MG91 effectors
  REGION 1..1359: note = Description: MG91-216 effector
MIEKPYYLGLDMGTNSVGWAVTDQHYNLLKAKGKDLWGIREFTEADTSVERRTHRISRRRRQREQARIGLLNDYFHDAIIAIDPSFFQRLENSKYHLEDKDQNVRYKYNIFNDPDYTDVDYYTQYPTIYHLRKELLENPKPHDIRLVYLALLNMFKRRGHFLNAAISDGNNERSLKDAYINFAISVSELTEDYFNQDVDYSAIEEILSSRDLNRTKKAEELSTVLGIDFKNKKYKEYLRAICGLKINAYTLFSEQLPDDTTKIDICVSDASFDEKSEELVSLIGEDLFQIILNIKEIYDIGSLTGILKGYTYLSQARVAAYDKHKHDLKLLKSSIKKYCTKEEYNNFFNSDADGSYASYIGSFNSGNKERRVGSKRTSEDLYKEIKKILKDANKNDPVINEIFTSIETESFLPKQLTASNGIIPNQVHSKEMAKILANAENYLPFLKDTDENNLSISNRILQLYKFQIPYYIGPVTEKSQRDGGNGWVIRKDNGHVLPWNIEEKIDVKATSEAFISRMVRRCTYMNGKQVLPKASLEYESFRVLNEINNLRIDGERIPVALKQDIYTDLFQKGKKVTKKQLCNYLVTRGLIESSEQVTGIDIAINNSLSTYGKFKAILGEDIKLDHIQHMIEDIVFWCTVYGDSKQFLKEQIEDKYKEKLSPEQMKRILGFKFKDWGNLSKEFFELKGADKSTGEAISIIRALWENNLNLMELINSPEFDFKERLADYETNSLKTLSDFEPEDLNEYYFSAPVRRMIWQTTLIIKELVHVLGKEPARIFIEMTREKDTSRGRTLSRKKKFEDLYKNVKDENTDWAKVIEHADESGTIRSKKMYLYLTQKGRCMYTGNHIELSDLFNDNLYDIDHIYPRHFVKDDNIDNNLVLVTKEKNAHKSDNYPLEAEIFNKQRNMWTQLRKEGFISEEKYNRLMGRNAFTDEQKAGFIARQLVETSQGTKGVAELFHQLLPNSKIVYAKAGNVSDFRRNRELPKSRLVNDFHHAHDAYLNIVVGNVYYVKFTQNPINYIKNSYNKDMNKNNYNLSRMFDWDVKRGDEAAWIAQKKDGTAGTISTVKKMLSKNTPLMTRLSYEGKGALANETLYSAKKAKEEGYIPFKSSDAKIQDVTKYGGFTSVTGAYFFLVEHDEKKKRIRTIESVPLYLANKIEKDSSELERYCDKLGLVNYDIRVRKIKIGTLIKYNGYFCYITGKTGYRLIVRNATNLCLASNWTKYIKKIEKYKETTIIDNVITAEENIKLYNELLNKFTVGIFGRRPNPIGEKMDSAKNTFTSYTLDNQCNLIYQILQLSKILGFETDLSLLRTNKQFGKPTREGGMQISKKINNTTSMYLINQSPTGLFETKIDLQTI

SEQ ID NO: 3025 - protein, 1352 aa, unidentified
  REGION 1..1352: note = Description of Unknown: uncultivated organism sequence
  REGION 1..1352: note = Category: MG91 effectors
  REGION 1..1352: note = Description: MG91-217 effector
MLEKPYYLGLDMGTNSVGWAVTDQHYNLLKAKGKDLWGIREFIEADTSVERRTHRISRRRRQREQARIGLLNDYFHDAIIAIDPSFFQRLENSKYHLEDKDQNVRYKYNIFNDPDYTDVDYYAQYPTIYHLRKELLENPKPHDVRLVYLALLNMFKRRGHFLNAGISDGNNERSLKDAYINFAISVSELTEDYFNQDVDYSAIEGILSSRDLNRTKKAEELSTVLGIDFKNKKYKEYLRAICGLKINAYTLFSDQLPDDTTKIDLCVSDASFDEKSEELVSLIGEDLFQIILNIKEIYDIGSLAGILKGYTYLSQARVAAYDKHKHDLKLLKSSIKKYCTKEEYNNFFNSDADGSYASYIGSFNSGNKERRVGSKRTSEDLYKEIKKLLKGANKSDPAINEIFTSIETESFLPKQLTASNGIIPNQVHSKEMARILTNAENYLPFLKETDENNLSISNRILQLYKFQIPYYIGPVTEKSQRDGGNGWVIRKDNGRVFPWNIEEKIDVKATSEAFISRMVRRCTYMNGKQVLPKASLEYESFRVLNEINNLRIDGERIPVTLKQDIYTDLFQKGKKVTKKQLCNYLATRGLIESSEQVTGIDIAINNSLSTYGKFKAIFGEDIKLDHIQHMIEDIVFWCTVYGDSKQFLKEQIEDKYKRKLSPEQMKRILGFKFKDWGNLSKEFFELKGADKSTGEAVSIIRALWENNLNLMELINSPEFDFKEQLADYEANSLKTLSDFEPEDLNDYYFSAPVRRMIWQTTLIIKELVHVLGKEPARIFIEMTREKDASRGRTLSRKKKFEDLYKNVKDENTDWAKVIEHADESGTIRSKKMYLYLTQKGRCMYTGNHIELSDLFNDNLYDIDHIYPRHFVKDDNIDNNLVLVTKEKNAHKSDNYPLEAEIFNKQRNMWTQLRKEGFISEEKYNRLMGRNAFTDEQKAGFIARQLVETSQGTKGVAELFHQLLPNSKIVYAKAGNVSDFRRNRELPKSRLVNDFHHAHDAYLNIVVGNVYYVKFTQNPINYIKNSYNKDMNKNNYNLSRMFDWDVKRGDEVAWVAQKQDAAAGTISTVKKMLSKNTPLMTRLSYEGKGALANETLYSAEKAKGEGYIPFKSSDAKIQDVTKYGGFTSVTGAYFFLVEHDEKKKRIRTIESVPLYLADKIDKDSLELERYCDKLGLVNYDVRVRKIKIGSLLNRNGYFAYLTGKTGKQLILRNATNLCLDKKWTIYIKKIEKYKETNVLDSIITSETMVNLYNELLNKFTVGIYGRRPNPIGEKMNSARDKFASLSIENQCLALYQILQLSAILGNESDLQLIGASTHAGKMLISKKIGTDEIYLINQSPTGLFETKIDLQTI

SEQ ID NO: 3026 - protein, 1359 aa, unidentified
  REGION 1..1359: note = Description of Unknown: uncultivated organism sequence
  REGION 1..1359: note = Category: MG91 effectors
  REGION 1..1359: note = Description: MG91-218 effector
MLEKPYYLGLDMGTNSVGWAVTDQQYNLLKAKGKDLWGIREFAEADTSVERRTHRISRRRRQREQARIGLLNDYFHDAIIAIDPSFFQRLENSKYHLEDKDQNVRYKYNIFNDPDYTDADYYTQYPTIYHLRKELLENPKPHDVRLVYLALLNMFKHRGHFLNSGISDGNNERSLKDAYINFAISVSELTEDYFNQDVDYSTIEGILSSRDLNRTKKAEELSTVLGIDFKNKKYKEYLRAICGLKINAYTLFSDQLPDDTTKIDLCVSDASFDEKSEELVSLIGEDLFQIILNIKEIYDIGSLAGILKGYTYLSQARVAAYDKHKHDLKLLKSSIKKYCTKEEYNNFFNSDADGSYASYIGSFNSGNKERRVGSKRTSEDLYKEIKKLLKGANKSDPAINEIFTSIETESFLPKQLTASNGIIPNQVHSKEMARILTNAENYLPFLKETDENNLSISNRILQLYKFQIPYYIGPVTEKSQRDGGNGWVIRKDNGRVFPWNIEEKIDVKATSEAFISRMVRRCTYMNGKQVLPKASLEYESFRVLNEINNLRIDGERIPVTLKQDIYTDLFQKGKKVTKKQLCNYLATRGLIESSEQVTGIDIAINNSLSTYGKFKAIFGEDIKLDHIQHMIEDIVFWCTVYGDSKQFLKEQIEDKYKGKLSPEQMKRILGFKFKDWGNLSKEFFELKGADKSTGEAVSIIRALWENNLNLMELINSPEFDFKEQLADYEANSLKTLSDFEPEDLNDYYFSAPVRRMIWQTTLIIKELVHVLGKEPARIFIEMTREKDASRGRTLSRKKKFEDLYKNVKDENTDWAKVIEHADESGTIRSKKMYLYLTQKGRCMYTGNHIELSDLFNDNLYDIDHIYPRYFVKDDNIDNNLVLVTKEKNAHKSDNYPLEAEIFNKQRNMWTQLRKEGFISEEKYNRLMGRNAFTDEQKAGFIARQLVETSQGTKGVAELFHQLLPNSKIVYAKAGNVSDFRRNRELPKSRLVNDFHHAHDAYLNIVVGNVYYVKFTQNPINYIKNSYNKDMNKNNYNLSRMFDWDVKRGDEVAWIAQKQDGATGTISTVKKMLSKNTPLMTRLSYEGKGALANETLYSAEKAKGEGYIPFKSSDTKIQDVTKYGGFTSVTGAYFFLVEHDEKKKRIRTIESVPLYLADKIDKDSSELERYCDKLGLVNYDIRVRKIKIGSLLNRNGYFAYLTGKTGKQLILRNATNLCLDKKWTRYIKKIEKYKETNVLDSIITSETMVNLYNELLNKFTVGIYGRRPNPIGEKMDSAKNTFTSYTLDNQCNLIYQILQLSKILGFETDLSLLRTNKQSGKPTREGGMQISKKIDNTTSMYLINQSPTGLFETKIDLQTI

SEQ ID NO: 3027 - protein, 1358 aa, unidentified
  REGION 1..1358: note = Description of Unknown: uncultivated organism sequence
  REGION 1..1358: note = Category: MG91 effectors
  REGION 1..1358: note = Description: MG91-219 effector
MEKEYYLGLDMGTNSVGWAVTDDAYNLIRFKGKDMWGIREFDEANPAVERRTHRTSRRREQRNAVRMGLIRSYFADEIQKVDSNFYQRLDNSFFHVEDKQDNVKDKNGIFNDKNYKDADYYKQYPTIFHLRKELIEDASQKDVRLVYLAVANMFKHRGHFLLSGIGSESSKQTITDLYNQVSGLITEEYGISLKTDIAGTDFEQVLCSREYSRTRKSEKVCEILEIKNSDKLKKAFVKSMCGLSVKITDVIDDTFTEISDEDKKITFSFVDSDYDEKAGVLEEKLGTDVYDIISKLKEIHDKAQVAEIMKNYQYLSFARVADYEKHKKDLKILKRVVKKYFEPTVYDKLFRSGENGTYSAYVNSFNSGEKSRRNYKERKQEDLYNSIKKLLKSIDNVCDTDIEYIKNEIEKENFLPKQLTFKNGVIPNQIHASELKAILKNAEKYLPFLNEKDESGYTVSERILMLFSFQIPYYVGPVSSNSNGWVKRLEPGQVLPWNIDKKIDLKETSEQFIQRMVRNCTYIAGEKVLPKASLLYENFKVLNEINNLSINGERIAVALKQDLYNTLFLKGKRVTRKQIFNYFHSRGLVEEDSQISGIDIAVNNSLSTYGKFLPLFGEHLKEDKYKKMVDDIVFWCTLYGDSRKFLREQLEEKYSDVLDENQIKRITGMKFKDWGNLSKEFLELLGCCKSTGEMIPLIRAMWETNYNLMELLHSEEFTYSEELEEKQGKIEKVLSEYTIDDLNEEYFSAHVKRMVWQTLLIIKEIEKIMKCPPTRIFVEMTRKDDEKGDNGRKSSRKDQLLALYKKIQSEDKEWKKEMSSRIEDYDKNGALRSKKLYLYFIQKGLDMYTGKPIDLDNLMSANSNYDIDHIYPRHFVKDDNINNNLVLASKPANAEKSDIYPIKDSIYQKMKYTWKVLRDEGLITEEKYKRLTGRNPFTDEQKAGFIARQLVETGQGTKGVADLLTALLPDTKLVYSKAGNVSDFRKRYDIPKSRLINDFHHAHDAYLNIVVGNIYFTKFTSNPLNYIRKECSSKDNKYQYNLGNMYKWDVKRDGKTAWIAAKEGETGTLATVKKMLSRNTPILTRLAIEGHGGIADATLYSHKKAKQDAYIPLKSSDARMADVTKYGGYSSVTTAYLFLVEHEIKGKKIRTLETVPLYLKDRLENSKEKLEEYCRETLGYTNPSVRMKKIKLQSLIKLNGYYMQISGKTNKQFTVRNYVQFCLNSKWVDYIHKLEKYQDKGVIDDAITDEKNVELYNVLCEKHSVGIFTLRPNPVGDKIKKGYDKFVNLTTEEQIKLLIEIIKLTCVGIVSANLTLIGGASISGKMLISKNITDAKECLLINQSVTGLYENRIDLLRV

SEQ ID NO: 3028 - protein, 1332 aa, unidentified
  REGION 1..1332: note = Description of Unknown: uncultivated organism sequence
  REGION 1..1332: note = Category: MG91 effectors
  REGION 1..1332: note = Description: MG91-220 effector
MLNTPYYLGLDMGTNSVGWAVTDKNYNLLRAKGKDLWGIREFSDSATSVDRRSYRIRRRRRQREQARIGLLKYYFNDSIIAKDPSFFQRLENSKYHLEDKDEAVKYKFNIFNDKTYTDIDYYTQYPTIYHLRKELLESSEPHDVRLVYLALLNMFKHRGHFLNAEIGDVAEERKLKDAYIDFCSCVSELTNESFNLDIDYSAVEEILSSRDISRTKKSEALASILNIDVKNKKYKEYVKAICGLKVNAYTLFSEQLSDEVKRIDICVSDASFDTKREDYISILGEDLFQIILYIKEIYDIGSLAGILKGYSYLSFARVATYEKHKSDLRKLKDCIRKYCSKEDYNQFFNSDAAGFYASYIGSFNSGKKQRRVGKNTTSEDLYKEIKKILKNADKNDPAIIDIFSSIDTESFLPKQLTASNGVIPNQVHYKEMAKILSNAESYLPFLREKNESNLSVSERILQIYKFQIPYYIGPVTEKSHRDGGNGWVIRKSNGRVLPWNINEKIDVKATSEAFISRMVRRCTYMNGAQVLPKASLEYESFRVLNEINNLRIDGERIPVDLKQAIYIDIFQKGKKITADILHKYLFNKGYIQSSEQVTGIDININNSLSTYGKFKVIFGEDIKLDSVQHMIEDIVFWCTVYGDSKKFLQEQIEEKYSDKISKEQLKRILGFKFKDWGSLSKEFFELKATDKSTGENISIIRALWENNLNLMELINSSKFNFKERLEEYRITSLKTLSDFEPEDLREYYFSAPVRKMIWQTMLVIKELVHVLGHEPERIFIEIPRDKDPSIGRTISRKKKFEELYKNVKDESVDWMNVIEHADDSGSLRSKKMYLYLTQKGRCMYTGEHIELSDLFNKSLYDIDHIYPRHFVKDDNIDNNLVLVKREKNAHKSDNYPLEAEIFNNQKKMWAQLRKEDFINEEKYKRLMGRNPFTDEQKAGFIARQLVETQQGTKGVAELLQQLLPNSKIVYTKAGNVSDFRHSREIPKSRLINDFHHAHDAYLSIVVGNVYYVKFTQNPINFIKNAYNKDSSKNNYNLTRMFDWDVKRRDEVAWIAQNKNGTVGTIAIVKKMLKRNTPLMTRLSYEGKGGLTKETLYSAEKAKGEGYIPFKSSDKKMQDVTKYGGFTSVKGAYFFLVEHDEKKKQIRTIESVPLYLADKIEKDPAELERYCQKLGLVNYNIRVRKIKIGTLIKRNGYFAYLTGKTGKQLILRNATNLCLDSKWGTYIKKIEKYKDTGVLDNTLDTDTNIKLYNELLDKFTTGIYGKRPNPIGDKMLSAKNTFTSFTLDNQCNLIYQILQLSKILGFETDLSLLHTNKKSDKPTREGGMQISKK

SEQ ID NO: 3029 - protein, 1352 aa, unidentified
  REGION 1..1352: note = Description of Unknown: uncultivated organism sequence
  REGION 1..1352: note = Category: MG91 effectors
  REGION 1..1352: note = Description: MG91-221 effector
MTAFKYYLGLDMGTNSVGWAATDPEYRLLKAKGKDLWGIREFNEASGAVERRTHRISRRRRQREQVRIGILKDYFHDAICEVDPGFFRRLENSKYHEEDKDVEVRYKNNIFNDRNYTDKDYFNEYPTIYHLRNELISSTEKHDVRLVFLALLNMFKHRGHFLNAGLGENNGESNIDNAYFELTELLSELTEYHLSQDIDCKQIEAILSRRDMSRTHKAEELAGVLHVDLKNKPYKELIRGLCGLKFNACVVFPDVQSEEVTKLDICLSESTFDEKSDEIANIIGEDYFEIIMAMKEMFDIGSLASIMKGHNYLSQARVASYTKHKEDLKLLKEVIKKYCGKKEYDKFFNSDADGSYASYVGSYNSKNKERRVGNKRTSEELYKEIKKLLKDAQKEDENVQKILTSIENETFLPKQLTASNGVIPNQVHAREMKKILSNAENYLPFLTEKDETGLSVSERILKLFTFQIPYYVGPTSENSGKNGGNGWVVRREDGQVLPWNIDEKIDMKATSEAFISRMVRRCTYISGEQVLPKASLEYQSYCVLNEINNIKIDGERISVELKQDIYKAVFQKGKKVTKKQLCKYLHTRGIIETEEQVTGVDVSINNALTTYGKFKPIFGEDISKDSVQKMIEDIVFWCTVYGDSKKFLKDRIEEKYGNKLSEEQIKRILGFKFKDWGNLSKKFLELNGADTSTGESISIIRALWNNNLNLMELINSSLYNYKECLAEYQNTMLKTLSEIEAEDLNEYYFSAPVRRMIWQTILVIKELVKVLGCEPERIFVEMTRKPDEHKTRTSSRRNKFEELYKKVKDETTDWMQVIANAEEDGKIRSKKMYLYLTQKGRCMYTGKHIELDDLFDNNLYDIDHIYPRHFVKDDNIDNNLVLVCKEKNAHKSDHYPIEEEIFLSQKKMWLELRKSGFITEEKYNRLMDRNPFSDEQKAGFIARQLVETSQGTKGVANILRQLLPGSKIVYAKASNVSEFRCTRDDIQKSRLVNDFHHAHDAYLNIVVGNVYYVKFTQNPLNFIKKDYDKYKEDYNLSKMFDWDVKRNGEVAWIAQRKDGAAGTITTVKRMLSRNTPLMTRYSFDGKGGLTNETLYSAKKAKGEGYIPFKSSDDKMQDVTKYGGFTSVTGAYFFLVEHTEKKKRIRTIESVPVYLAQKIEQNPDELKKYCEEILGLIDADIRLKKIKIGSLIKRNGYFCYITGKTVNRLIVRNAVNLCLKNEWIKYISKLEKVKEKDAVDKIITKEKNEVLYSELIQKFKHGIFSKRPNPVGDKLEKDSEKFNNLSIKDQCAVLCQVLRMAAILGSECDMTLLGDSPNCGKMLISKKIGDEEIYLINQSVTGLYEKKINLHTV

SEQ ID NO: 3030 - protein, 1358 aa, unidentified
  REGION 1..1358: note = Description of Unknown: uncultivated organism sequence
  REGION 1..1358: note = Category: MG91 effectors
  REGION 1..1358: note = Description: MG91-222 effector
MEKEYYLGLDMGTNSVGWAVTDDAYNLIRFKGKDMWGIREFDEANPAVERRTHRTSRRREQRNAVRMGLIRSYFADEIQKVDSNFYQRLDNSFFHVEDKQDNVKDKNGIFNDKNYKDADYYKQYPTIFHLRKELIEDASQKDVRLVYLAVANMFKHRGHFLLSGIGSESSKQTITDLYNQVSGLITEEYGISLKTDIAGTDFEQVLCSREYSRTRKSEKVCEILEIKNSDKLKKAFVKSMCGLSVKITDIIDDTFTEISDEDKKITFSFVDSDYDEKAGVLEEKLGTDVYDIISKLKEIHDKAQVAEIMKNYQYLSFARVADYEKHKKDLKILKRVVKKHFEPTVYDKLFRSEENGTYSAYVNSFNSEEKSRRNYKERKQEDLYNSIKKLLKSVDNVDDTDIEYIKNEMDKENFLPKQLTFKNGVIPNQIHASELKAILKNAEKYLPFLNEKDESGYTVSERILMLFSFQIPYYVGPVSSNSNGWVKRLESGQVLPWNIDKKIDLKETSEQFIQRMVRNCTYIAGEKVLPKASLLYENFKVLNEINNLSINGERIAVALKQDLYNTLFLKGKRVTRKQIFNYFHSRGLVEEDSQISGIDIAVNNSLSTYGKFLPLFGEHLKEDKYKKMVDDIVFWCTVYGDSRKFLREQLEEKYSDVLDENQIKRITGMKFKDWGNLSKEFLELLGCCKSTGEMIPLIRAMWETNYNLMELLHSEEFTYSEELEEKQGKIEKVLSEYTIDDLNEEYFSAHVKRMVWQTLLIIKEIEKIMKCPPTRIFVEMTRKDDEKGDNGRKSSRKDQLLALYKKIQSEDKEWKKEMSSRIEDYDKNGALRSKKLYLYFIQKGLDMYTGKPIDLDNLMSANSNYDIDHIYPRHFVKDDNINNNLVLASKPANAEKSDIYPIKDSIYQKMKYTWKVLRDEGLITEEKYKRLTGRNPFTDEQKAGFIARQLVETGQGTKGVADLLTALLPDTKLVYSKAGNVSDFRKRYDIPKSRLINDFHHAHDAYLNIVVGNIYFTKFTSNPLNYIRKECSSKDNKYQYNLGNMYKWDVKRDGKTAWIAAKEGETGTLATVKKMLSRNTPILTRLAIEGHGGIADATLYSHKKAKQDAYIPLKSSDARMADVTKYGGYSSVTTAYLFLVEHEIKGKKIRTLETVPLYLKDRLENSKEKLEEYCRETLGYTNPSVRMKKIKLQSLIKLNGYYMQISGKTNKQFTVRNYVQFCLNSKWVDYIHKLEKYQDKGVIDDAITDEKNVELYNVLCEKHSVGIFTLRPNPVGDKIKKGYDKFVNLTTEEQIKLLIEIIKLTCVGIVSANLTLIGGASISGKMLISKNITDAKECLLINQSVTGLYENRIDLLRV

SEQ ID NO: 3031 - protein, 1352 aa, unidentified
  REGION 1..1352: note = Description of Unknown: uncultivated organism sequence
  REGION 1..1352: note = Category: MG91 effectors
  REGION 1..1352: note = Description: MG91-223 effector
MTAFKYYLGLDMGTNSVGWAATDPEYRLLKAKGKDLWGIREFNEASGAVERRTHRISRRRKQREQVRIGILKDYFHDAICEVDPSFFQRLENSKYHEEDKDVEVRYKNNIFNDSNYTDKDYFNEYPTIYHLRNELISSTEKHDVRLVFLALLNMFKHRGHFLNAGLGENNGESNIDNAYFELTELLSELTEYHLSQDIDCKQIEAILSRRDMSRTHKAEELAGVLHVDLKNKPYKELIRGLCGLKFNACVVFPDVQSEEVTKLDICLSESTFDEKSDEIANIIGEDYFEIIMAMKEMFDIGSLASIMKGHNYLSQARVASYTKHKEDLKLLKEVIKKYCGKKEYDKFFNSDADGSYASYVGSYNSKNKERRVGNKRTSEELYKEIKKLLKDAQKEDENVQKILTSIENETFLPKQLTASNGVIPNQVHAREMKKILSNAENYLPFLTEKDETGLSVSERILKLFTFQIPYYVGPTSENSGKNGGNGWVVRREDGQVLPWNIDEKIDMKATSEAFISRMVRRCTYISGEQVLPKASLEYQSYCVLNEINNIKIDGERISVELKQDIYKAVFQKGKKVTKKQLCKYLHTRGIIETEEQVTGVDVSINNALTTYGKFKPIFGEDISKDSVQKMIEDIVFWCTVYGDSKKFLKDRIEEKYGNKLSEEQIKRILGFKFKDWGNLSKKFLELNGADTSTGESISIIRALWNNNLNLMELINSSLYNYKECLAEYQNTMLKTLSEIEAEDLNEYYFSAPVRRMIWQTILVIKELVKVLGCEPERIFVEMTRRPDEHKTRTSSRRNKFEELYKKVKDETTDWMQVIANAEEDGKIRSKKMYLYLTQKGRCMYTGKHIELDDLFDNNLYDIDHIYPRHFVKDDNIDNNLVLVCKEKNAHKSDHYPIEEEIFLSQKKMWLELRKSGFITEEKYNRLMGRSPFSDEKKAGFIARQLVETSQGTKGVANILRQLLPGSKIVYAKASNVSEFRHTRDDIPKSRLVNDFHHAHDAYLNIVVGNVYYVKFTQNPLNFIKKDYDKYKEDYNLSKMFDWDVKRNGEVAWIAQRKDGEAGTITTVKKMLSRNTPLMTRYSFEGKGGLANETLYSAKKAKGEGYIPFKSSDDKMQDVTKYGGFTKVTGAYFFLVEHTEKKKRIRTIESVPVYLAQKIEQNPDELKKYCEEILGLVDADIRLKKIKIGSLIKRNGYFCYITGKTGNRLSVRNAVNLCLKNEWIKYISKLEKVKEKDTVDEIITKEKNEVLYSELIQKFKHGIFSKRPNPVEDKLEKGSEKFSNLSIKEQCAVLCQILQLAAVLGSECDMTLLGESAHCGKMLISKKIGDEEIYLLNQSVTGLYEKKINLHTV

SEQ ID NO: 3032 - protein, 1352 aa, unidentified
  REGION 1..1352: note = Description of Unknown: uncultivated organism sequence
  REGION 1..1352: note = Category: MG91 effectors
  REGION 1..1352: note = Description: MG91-224 effector
MTAFKYYLGLDMGTNSVGWAATDPEYRLLKAKGKDLWGIREFNEASGAVERRTHRISRRRRQREQVRIGILKDYFHDAICEVDPSFFQRLENSKYHEEDKDVEVRYKNNIFNDSNYTDKDYFNEYPTIYHLRNELISSTEKHDVRLVFLALLNMFKHRGHFLNAGLGENNGESNIDNVYFELTELLSELTEYHLSQDIDCKQIEAILSRRDMSRTHKAEELAGVLHVDLKNKPYKELIRGLCGLKFNACVVFPDVQSEEVTKLDICLSESTFDEKSDEIANIIGEDYFEIIMAMKEMFDIGSLASIMKGHNYLSQARVASYTKHKEDLKLLKEVIKKYCGKKEYDKFFNSDADGSYASYVGSYNSKNKERRVGNKRTSEELYKEIKKLLKDAQKEDENVQKILTSIENETFLPKQLTASNGVIPNQVHAREMKKILSNAENYLPFLTEKDETGLSVSERILKLFTFQIPYYVGPTSENSGKNGGNGWVVRREDGQVLPWNIDEKIDMKATSEAFISRMVRRCTYISGEQVLPKASLEYQSYCVLNEINNIKIDGERISVELKQDIYKAVFQKGKKVTKKQLCKYLHTRGIIETEEQVTGVDVSINNALTTYGKFKPIFGEDISKDSVQKMIEDIVFWCTVYGDSKKFLKDRIEEKYGNKLSEEQIKRILGFKFKDWGNLSKKFLELNGADTSTGESISIIRALWNNNLNLMELINSSLYNYKECLAEYQNTMLKTLSEIEAEDLNEYYFSAPVRRMIWQTILVIKELVKVLGCEPERIFVEMTRKPDEHKTRTSSRRNKFEELYKKVKDETTDWMQVIANAEEDGKIRSKKMYLYLTQKGRCMYTGKHIELDDLFDNNLYDIDHIYPRHFVKDDNIDNNLVLVCKEKNAHKSDHYPIEEEIFLSQKKMWLELRKSGFITEEKYNRLMDRNPFSDEQKAGFIARQLVETSQGTKGVANILRQLLPGSKIVYAKASNVSEFRCTRDDIQKSRLVNDFHHAHDAYLNIVVGNVYYVKFTQNPLNFIKKDYDKYKEDYNLSKMFDWDVKRNGEVAWIAQRKDGAAGTITTVKRMLSRNTPLMTRYSFDGKGGLTNETLYSAKKAKGEGYIPFKSSDDKMQDVTKYGGFTSVTGAYFFLVEHTEKKKRIRTIESVPVYLAQKIEQNPDELKKYCEEILGLIDADIRLKKIKIGSLIKRNGYFCYITGKTVNRLIVRNAVNLCLKNEWIKYISKLEKVKEKDAVDKIITKEKNEVLYSELIQKFKHGIFSKRPNPVGDKLEKDSEKFNNLSIKDQCAVLCQVLRMAAILGSECDMTLLGDSPNCGKMLISKKIGDEEIYLINQSVTGLYEKKINLHTV

SEQ ID NO: 3033 - protein, 1352 aa, unidentified
  REGION 1..1352: note = Description of Unknown: uncultivated organism sequence
  REGION 1..1352: note = Category: MG91 effectors
  REGION 1..1352: note = Description: MG91-225 effector
MTAFKYYLGLDMGTNSVGWAATDPEYRLLKAKGKDLWGIREFNEASGAVERRTHRISRRRRQREQVRIGILKDYFHDAICEVDPSFFQRLENSKYHEEDKDVEVRYKNNIFNDSNYTDKDYFNEYPTIYHLRNELISSTEKHDVRLVFLALLNMFKHRGHFLNAGLGENNGESNIDNVYFELTELLSELTEYHLSQDIDCKQIEAILSRRDMSRTHKAEELAGVLHVDLKNKPYKELIRGLCGLKFNACVVFPDVQSEEVTKLDICLSESTFDEKSDEIANIIGEDYFEIIMAMKEMFDIGSLASIMKGHNYLSQARVASYTKHKEDLKLLKEVIKKYCGKKEYDKFFNSDADGSYASYVGSYNSKNKERRVGNKRTSEELYKEIKKLLKDAQKEDENVQKILTSIENETFLPKQLTASNGVIPNQVHAREMKKILSNAENYLPFLTEKDETGLSVSERILKLFTFQIPYYVGPTSENSGKNGGNGWVVRREDGQVLPWNIDEKIDMKATSEAFISRMVRRCTYISGEQVLPKASLEYQSYCVLNEINNIKIDGERISVELKQDIYKAVFQKGKKVTKKQLCKYLHTRGIIETEEQVTGVDVSINNALTTYGKFKPIFGEDISKDSVQKMIEDIVFWCTVYGDSKKFLKDRIEEKYGNKLSEEQIQRILGFKFKDWGNLSKKFLELNGADTSTGESISIIRALWNNNLNLMELINSSLYNYKECLAEYQNTMLKTLSEIEAEDLNEYYFSAPVRRMIWQTILVIKELVKVLGCEPERIFVEMTRKPDEHKTRTSSRRNKFEELYKKVKDETTDWMQVIANAEEDGKIRSKKMYLYLTQKGRCMYTGKHIELDDLFDNNLYDIDHIYPRHFVKDDNIDNNLVLVCKEKNAHKSDHYPIEEEIFLSQKKMWLELRKSGFITEEKYNRLMGRNPFSDEQKAGFIARQLVETSQGTKGVANILRQLLPGSKIVYAKASNVSEFRRTRDDIPKSRLVNDFHHAHDAYLNIVVGNVYYVKFTQNPLNFIKKDYDNYKEDYNLSKMFDWDVKRNGEVAWIAQRKDGEAGTITTVKKMLSRNTPLMTRYSFEGKGGLANETLYSAKKAKGEGYIPFKSSDDKMQDVTKYGGFTSVTGAYFFLVEHAEKKKRIRTIESVPVYLAQKIEQNPDELKKYCEEILGLIDADIRLKKIKIGSLIKRNGYFCYITGKTGKQLIVRNAVNLCLKNEWIKYISKLEKVKEKDAVDKIITKEKNEVLYSELIQKFKHGIFSKRPNPVGDKLEKGSEKFSNLSIKEQCTVLCQILQLAAVLGSECDMTLLGESAHCGKMLISKKIGDEEIYLINQSVTGLYEKKINLHTV

SEQ ID NO: 3034 - protein, 1352 aa, unidentified
  REGION 1..1352: note = Description of Unknown: uncultivated organism sequence
  REGION 1..1352: note = Category: MG91 effectors
  REGION 1..1352: note = Description: MG91-226 effector
MTAFKYYLGLDMGTNSVGWAATDPEYRLLKAKGKDLWGIREFNEASGAVERRTHRISRRRRQREQVRIGILKDYFHDAICEVDPGFFRRLENSKYHEEDKDVEVRYKNNIFNDSNYTDKDYFNEYPTIYHLRNELISSTEKHDVRLVFLALLNMFKHRGHFLNAGLGENNGESNIDNAYFELTELLSELTEYHLSQDIDCKQIEAILSRRDMSRTHKAEELAGVLHVDLKNKPYKELIRGLCGLKFNACVVFPDVQSEEVTKLDICLSESTFDEKSDEIANIIGEDYFEIIMAMKEMFDIGSLASIMKGHNYLSQARVASYTKHKEDLKLLKEVIKKYCGKKEYDKFFNSDADGSYASYVGSYNSKNKERRVGNKRTSEELYKEIKKLLKDAQKEDENVQKILTSIENETFLPKQLTASNGVIPNQVHAREMKKILSNAENYLPFLTEKDETGLSVSERILKLFTFQIPYYVGPTSENSGKNGGNGWVVRREDGQVLPWNIDEKIDMKATSEAFISRMVRRCTYISGEQVLPKASLEYQSYCVLNEINNIKIDGERISVELKQDIYKAVFQKGKKVTKKQLCKYLHTRGIIETEEQVTGVDVSINNALTTYGKFKPIFGEDISKDSVQKMIEDIVFWCTVYGDSKKFLKDRIEEKYGNKLSEEQIKRILGFKFKDWGNLSKKFLELNGADTSTGESISIIRALWNNNLNLMELINSSLYNYKECLAEYQNTMLKTLSEIEAEDLNEYYFSAPVRRIIWQTILVIKELVKVLGCEPERIFVEMTRKPDEHKTRTSSRRNKFEELYKKVKDEATDWMQVIAKAEEDGKIRSKKMYLYLTQKGRCMYTGKHIELDDLFDKNLYDIDHIYPRHFVKDDNIDNNLVLVCKEKNAHKSDHYPIEEEIFLSQKKMWLELRKSGFITEEKYNRLMGRSPFSDEQKAGFIARQLVETSQGTKGVANILRQLLPGSKIVYAKASNVSEFRHTRDDIPKSRLVNDFHHAHDAYLNIVVGNVYYVKFTQNPLNFIKKDYDKYKEDYNLSKMFDWDVKRNGEVAWIAQRKDGEAGTITTVKRMLSRNTPLMTRYSFEGKGGLANETLCSAKKAKGEGYIPFKSSDDKMQDVTKYGGFTKVTGAYFFLVEHTEKKKRIRTIESVPVYLAQKIEQNPDELKKYCEEILGLVDADIRLKKIKIGSLIKRNGYFCYITGKTGNRLSVRNAVNLCLKNEWIKYISKLEKVKEKDAVDEIITKEKNEVLYSELIQKFKHGIFSKRPNPVEDKLEKGSEKFSNLSIKEQCAVLCQILQLAAVLGSECDMTLLGESAHCGKMLISKKIGDEEIYLINQSVTGLYEKKINLHTV

SEQ ID NO: 3035 - protein, 1352 aa, unidentified
  REGION 1..1352: note = Description of Unknown: uncultivated organism sequence
  REGION 1..1352: note = Category: MG91 effectors
  REGION 1..1352: note = Description: MG91-227 effector
MLEKPYYLGLDMGTNSVGWAVTDQQYNLLKAKGKDLWGIREFAEADTSVERRTHRISRRRRQREQARIGLLNDYFHDAIIAIDPSFFQRLENSKYHLEDKDQNVRYKYNIFNDPDYTDADYYTQYPTIYHLRKELLENPKPHDVRLVYLALLNMFKHRGHFLNSGISDGNNERSLKDAYINFAISVSELTEDYFNQEVDYSTIEGILSSRDLNRTKKAEELSTVLGIDFKNKKYKEYLRAICGLKINAYTLFSDQLPDDTTKIDLCVSDASFDEKSEELVSLIGEDLFQIILNIKEIYDIGSLAGILKGYTYLSQARVAAYDKHKHDLKLLKSSIKKYCTKEEYNNFFNSDADGSYASYIGSFNSGNKERRVGSKRTSEDLYKEIKKLLKGANKSDPAINEIFTSIETESFLPKQLTASNGIIPNQVHSKEMARILTNAENYLPFLKETDENNLSISNRILQLYKFQIPYYIGPVTEKSQRDGGNGWVIRKDNGRVFPWNIEEKIDVKATSEAFISRMVRRCTYMNGKQVLPKASLEYESFRVLNEINNLRIDGERIPVTLKQDIYTDLFQKGKKVTKKQLCNYLATRGLIESSEQVTGIDIAINNSLSTYGKFKAILGEDIKLDHIQHMIEDIVFWCTVYGDSKQFLKEQIEDKYKGKLSPEQMKRILGFKFKDWGNLSKEFFELKGADKSTGEAVSIIRALWENNLNLMELINSPEFDFKEQLADYEANSLKTLSDFEPEDLNEYYFSAPVRRMIWQTTLIIKELVHVLGKEPARIFIEMTREKDASRGRTLSRKKKFEDLYKNVKDENTDWAKVIEHADESGTIRSKKMYLYLTQKGRCMYTGNHIELSDLFNDNLYDIDHIYPRHFVKDDNIDNNLVLVTKEKNAHKSDNYPLEAEIFNKQRNMWTQLRKEGFISEEKYNRLMGRNAFTDEQKAGFIARQLVETSQGTKGVAELFHQLLPNSKIVYAKAGNVSDFRRNRELPKSRLVNDFHHAHDAYLNIVVGNVYYVKFTQNPINYIKNSYNKDMNKNNYNLSRMFDWDVKRGDEVAWVAQKQDAAAGTISTVKKMLSKNTPLMTRLSYEGKGALANETLYSAEKAKGEGYIPFKSSDAKIQDVTKYGGFTSVTGAYFFLVEHDEKKKRIRTIESVPLYLADKIDKDSSELERYCDKLGLVNYDVRVRKIKIGSLLNRNGYFAYLTGKTGKQLILRNATNLCLDKKWTIYIKKIEKYKETNVLDSIITSETMVNLYNELLNKFTVGIYGRRPNPIGEKMNSARDKFASLSIENQCLALYQILQLSAILGNESDLQLIGASTHAGKMLISKKIGTDEIYLINQSPTGLFETKIDLQTI

SEQ ID NO: 3036 - protein, 1358 aa, unidentified
  REGION 1..1358: note = Description of Unknown: uncultivated organism sequence
  REGION 1..1358: note = Category: MG91 effectors
  REGION 1..1358: note = Description: MG91-228 effector
MEKEYYLGLDMGTNSVGWAVTDDAYNLIRFKGKDMWGIREFDEANPAVERRTHRTSRRREQRNAVRMGLIRSYFADEIQKVDSNFYQRLDNSFFHVEDKQDNVKDKNGIFNDKNYKDADYYKQYPTIFHLRKELIEDASQKDVRLVYLAVANMFKHRGHFLLSGIGSESSKQTITDLYNQVSGLITEEYGISLKTDIAGTDFEQVLCSREYSRTRKSEKVCEILEIKNSDKLKKAFVKSMCGLSVKITDVIDDTFTEISDEDKKITFSFVDSDYDEKAGVLEEKLGTDVYDIISKLKEIHDKAQVAEIMKNYQYLSFARVADYEKHKKDLKILKRVVKKYFEPTVYDKLFRSGENGTYSAYVNSFNSGEKSRRNYKERKQEDLYNSIKKLLKSIDNVCDTDIEYIKNEIEKENFLPKQLTFKNGVIPNQIHASELKAILKNAEKYLPFLNEKDESGYTVSERILMLFSFQIPYYVGPVSPNSNGWVKRLEPGQVLPWNIDKKIDLKETSEQFIQRMVRNCTYIAGEKVLPKASLLYENFKVLNEINNLSINGERIAVALKQDLYNTLFLKGKRVTRKQIFNYFHSRGLVEEDSQISGIDIAVNNSLSTYGKFLPLFGEHLKEDKYKKMVDDIVFWCTVYGDSRKFLREQLEEKYSDVLDENQIKRITGMKFKDWGNLSKEFLELSGCCKSTGEMIPLIRAMWETNYNLMELLHSEEFTYSEELEEKQGKIEKVLSEYTIDDLNEEYFSAPVKRMVWQTLLIIKEIEKIMKCPPTRIFVEMTRKDDEKGDNGRKSSRKDQLLALYKKIQSEDKEWKKEMSSRIEDYDKNGALRSKKLYLYFIQKGLDMYTGKPIDLDNLMSANSNYDIDHIYPRHFVKDDNINNNLVLASKPANAEKSDIYPIKDSIYQKMKYTWKVLRDEGFITEEKYKRLTGRNPFTDEQKAGFIARQLVETGQGTKGVADLLTALLPDTKLVYSKAGNVSDFRKKYDIPKSRLINDFHHAHDAYLNIVVGNIYFTKFTSNPLNYIRKECSSKDNKYQYNLGNMYKWDVKRDGKTAWIAAKEGETGTIATVKKILSRNTPTLTRLTIEGHGGIADATLYSHKKAKQDAYIPLKSSDARMADVTKYGGYSSVTTAYLFLVEHEIKGKKIRTLETVPLYLKDRLENSKEKLEEYCRETLGYTNLSVRMKKIKLQSLIKLNGYYMQISGKTNKQFTVRNYVQFCLNSKWVDYIHKLEKYQDKGVIDDAITDEKNVELYNVLCEKHSVGIFTLRPNPVGDKIKKGYDKFVNLTTEEQIKLLIEIIKLTCVGIVSANLTLIGGAAISGKMLISKNITDAKECLLINQSVTGLYENRIDLLRV

SEQ ID NO: 3037 - protein, 1352 aa, unidentified
  REGION 1..1352: note = Description of Unknown: uncultivated organism sequence
  REGION 1..1352: note = Category: MG91 effectors
  REGION 1..1352: note = Description: MG91-229 effector
MLEKPYYLGLDMGTNSVGWAVTDQQYNLLKAKGKDLWGIREFAEADTSVERRTHRISRRRRQREQARIGLLNDYFHDAIIAIDPSFFQRLENSKYHLEDKDQNVRYKYNIFNDPDYTDADYYTQYPTIYHLRKELLENPKPHDVRLVYLALLNMFKHRGHFLNSGISDGNNERSLKDAYINFAISVSELTEDYFNQDVDYSTIEGILSSRDLNRTKKAEELSTVLGIDFKNKKYKEYLRAICGLKINAYTLFSDQLPDDTTKIDLCVSDASFDEKSEELVSLIGEDLFQIILNIKEIYDIGSLAGILKGYTYLSQARVAAYDKHKHDLKLLKSSIKKYCTKEEYNNFFNSDADGSYASYIGSFNSGNKERRVGSKRTSEDLYKEIKKLLKGANKSDPAINEIFTSIETESFLPKQLTASNGIIPNQVHSKEMARILTNAENYLPFLKETDENNLSISNRILQLYKFQIPYYIGPVTEKSQRDGGNGWVIRKDNGRVFPWNIEEKIDVKATSEAFISRMVRRCTYMNGKQVLPKASLEYESFRVLNEINNLRIDGERIPVTLKQDIYTDLFQKGKKVTKKQLCNYLATRGLIESSEQVTGIDIAINNSLSTYGKFKAIFGEDIKLDHIQHMIDDIVFWCTVYGDSKQFLKEQIEDKYKGKLSPEQMKRILGFKFKDWGNLSKEFFELKGADKSTGEAVSIIRALWENNLNLMELINSPEFDFKEQLADYEANSLKTLSDFEPEDLNDYYFSAPVRRMIWQTTLIIKELVHVLGKEPARIFIEMTREKDASRGRTLSRKKKFEDLYKNVKDENTDWAKVIEHADESGTIRSKKMYLYLTQKGRCMYTGNHIELSDLFNDNLYDIDHIYPRHFVKDDNIDNNLVLVTKEKNAHKSDNYPLEAEIFNKQRNMWTQLRKEGFISEEKYNRLMGRNAFTDEQKAGFIARQLVETSQGTKGVAELFHQLLPNSKIVYAKAGNVSDFRRNREFPKSRLVNDFHHAHDAYLNIVVGNVYYVKFTQNPINYIKNSYNKDMNKNNYNLSRMFDWDVKRGDEVAWIAQKQDGAAGTISTVKKMLSKNTPLMTRLSYEGKGALANETLYSAEKAKGEGYIPFKSSDTKIQDVTKYGGFTSVTGAYFFLVEHDEKKKRIRTIESVPLYLADKIDKDSSELERYCDKLGLVNYDVRVRKIKIGSLIKYNGYFCYITGKTGYRLIVRNATNLCLASNWRKYIKKIEKYKETTIIDNVITAEENIKLYNELLNKFTVGIFGRRPNPIGEKMDSARDKFASLSIENQCLALYQILQLTAILGNESDLQLIGASTHAGKMLISKKIGTDEIYLINQSPTGLFETKIDLQTI

SEQ ID NO: 3038 - protein, 1352 aa, unidentified
  REGION 1..1352: note = Description of Unknown: uncultivated organism sequence
  REGION 1..1352: note = Category: MG91 effectors
  REGION 1..1352: note = Description: MG91-230 effector
MTAFKYYLGLDMGTNSVGWAATDPEYRLLKAKGKDLWGIREFNEASGAVERRTHRISRRRRQREQVRIGILKDYFHDAICEVDPSFFQRLENSKYHEEDKDVEVRYKNNIFNDSNYTDKDYFNEYPTIYHLRNELISSTEKHDVRLVFLALLNMFKHRGHFLNAGLGENNGESNIDNAYFELTELLSELTEYHLSQDIDCKQIEAILSRRDMSRTHKAEELAGVLHVDLKNKPYKELIRGLCGLKFNACVVFPDVQSEEVTKLDICLSESTFDEKSDEIANIIGEDYFEIIMAMKEMFDIGSLASIMKGHNYLSQARVASYTKHKEDLKLLKEVIKKYCGKKEYDKFFNSDADGSYASYVGSYNSKNKERRVGNKRTSEELYKEIKKLLKDAQKEDENVQKILTSIENETFLPKQLTASNGVIPNQVHAREMKKILSNAENYLPFLTEKDETGLSVSERILKLFTFQIPYYVGPTSENSGKNGGNGWVVRREDGQVLPWNIDEKIDMKATSEAFISRMVRRCTYISGEQVLPKASLEYQSYCVLNEINNIKIDGERISVELKQDIYKAVFQKGKKVTKKQLCKYLHTRGIIETEEQVTGVDVSINNALTTYGKFKPIFGEDISKDSVQKMIEDIVFWCTVYGDSKKFLKDRIEEKYGNKLSEEQIKRILGFKFKDWGNLSKKFLELNGADTSTGESISIIRALWNNNLNLMELINSSLYNYKECLAEYQNTMLKTLSEIEAEDLNEYYFSAPVRRMIWQTILVIKELVKVLGCEPERIFVEMTRKPDEHKTRTSSRRNKFEELYKKVKDETTDWMQVIANAEEDGKIRSKKMYLYLTQKGRCMYTGKHIELDDLFDKNLYDIDHIYPRHFVKDDNIDNNLVLVCKEKNAHKSDHYPIEEEIFLSQKKMWLELRKSGFITEEKYNRLMGRSPFSDEQKAGFIARQLVETSQGTKGVANILRQLLPGSKIVYAKASNVSEFRHTRDDIPKSRLVNDFHHAHDAYLNIVVGNVYYVKFTQNPLNFIKKDYDKYKEDYNLSKMFDWDVKRNGEVAWIAQRKDGEAGTITTVKRMLSRNTPLMTRYSFEGKGGLANETLCSAKKAKGEGYIPFKSSDDKMQDVTKYGGFTKVTGAYFFLVEHTEKKKRIRTIESVPVYLAQKIEQNPDELKKYCEEILGLVDADIRLKKIKIGSLIKRNGYFCYITGKTGNRLSVRNAVNLCLKNEWIKYISKLEKVKEKDAVDEIITKEKNEVLYSELIQKFKHGIFSKRPNPVEDKLEKGSEKFSNLSIKEQCAVLCQILQLAAVLGSECDMTLLGESAHCGKMLISKKIGDEEIYLLNQSVTGLYEKKINLHTV

SEQ ID NO: 3039 - protein, 1359 aa, unidentified
  REGION 1..1359: note = Description of Unknown: uncultivated organism sequence
  REGION 1..1359: note = Category: MG91 effectors
  REGION 1..1359: note = Description: MG91-231 effector
MQEKPYYLGLDMGTNSVGWAVTDQHYNLLKAKGKDLWGIREFIEADTSVERRTHRISRRRRQREQARIGLLNDYFHDAIIAIDPSFFQRLENSKYHLEDKDQNVRYKYNIFNDPDYTDADYYTQYPTIYHLRKELLENPKPHDVRLVYLALLNMFKHRGHFLNSGISDGNNERSLKDAYINFAISVSELTEDYFNQDVDYSTIEGILSSRDLNRTKKAEELSTVLGIDFKNKKYKEYLRAICGLKINAYTLFSDQLPDDTTKIDLCVSDASFDEKSEELVSLIGEDLFQIILNIKEIYDIGSLAGILKGYTYLSQARVAAYDKHKHDLKLLKSSIKKYCTKEEYNNFFNSDADGSYASYIGSFNSGNKERRVGSKRTSEDLYKEIKKLLKGANKSDPAINEIFTSIETESFLPKQLTASNGIIPNQVHSKEMARILTNAENYLPFLKETDENNLSISNRILQLYKFQIPYYIGPVTEKSQRDGGNGWVIRKDNGRVFPWNIEEKIDVKATSEAFISRMVRRCTYMNGKQVLPKASLEYESFRVLNEINNLRIDGERIPVTLKQDIYTDLFQKGKKVTKKQLCNYLATRGLIESSEQVTGIDIAINNSLSTYGKFKAIFGEDIKLDHIQHMIEDIVFWCTVYGDSKQFLKEQIEDKYKGKLSPEQMKRILGFKFKDWGNLSKEFFELKGADKSTGEAVSIIRALWENNLNLMELINSSEFDFKEQLADYEANSLKTLSDFEPEDLNDYYFSAPVRRMIWQTTLIIKELVHVLGKEPARIFIEMTREKDASRGRTLSRKKKFEDLYKNVKDENTDWAKVIEHADESGTIRSKKMYLYLTQKGRCMYTGNHIELSDLFNDNLYDIDHIYPRHFVKDDNIDNNLVLVTKEKNAHKSDNYPLEAEIFNKQRNMWTQLRKEGFISEEKYNRLMGRNAFTDEQKAGFIARQLVETSQGTKGVAELFHQLLPNSKIVYAKAGNVSDFRRNRELPKSRLVNDFHHAHDAYLNIVVGNVYYVKFTQNPINYIKNSYNKDMNKNNYNLSRMFDWDVKRGDEVAWIAQKQDGAAGTISTVKKMLSKNTPLMTRLSYEGKGALANETLYSAEKAKGEGYIPFKSSDTKIQDVTKYGGFTSVTGAYFFLVEHDEKKKRIRTIESVPLYLADKIDKDSSELERYCDKLGLVNYDVRVRKIKIGSLLNRNGYFAYLTGKTGKQLILRNATNLCLDKKWTRYIKKIEKYKETNVLDSIITSETMVNLYNELLNKFTVGIYGRRPNPIGEKMDSAKNTFTSYTLDNQCNLIYQILQLSKILGFETDLSLLRTNKQSGKPTREGGMQISKKIDNTTSMYLINQSPTGLFETKIDLQTI

SEQ ID NO: 3040 - protein, 1359 aa, unidentified
  REGION 1..1359: note = Description of Unknown: uncultivated organism sequence
  REGION 1..1359: note = Category: MG91 effectors
  REGION 1..1359: note = Description: MG91-232 effector
MLEKPYYLGLDMGTNSVGWAVTDQQYNLLKAKGKDLWGIREFAEADTSVERRTHRISRRRRQREQARIGLLNDYFHDAIIAIDPSFFQRLENSKYHLEDKDQNVRYKYNIFNDPDYTDADYYTQYPTIYHLRKELLENPKPHDVRLVYLALLNMFKHRGHFLNSGISDGNNERSLKDAYINFAISVSELTEDYFNQDVDYSTIEGILSSRDLNRTKKAEELSTVLGIDFKNKKYKEYLRAICGLKINAYTLFSDQLPDDTTKIDLCVSDASFDEKSEELVSLIGEDLFQIILNIKEIYDIGSLAGILKGYTYLSQARVAAYDKHKHDLKLLKSSIKKYCTKEEYNNFFNSDADGSYASYIGSFNSGNKERRVGSKRTSEDLYKEIKKLLKGANKSDPAINEIFTSIETESFLPKQLTASNGIIPNQVHSKEMARILTNAENYLPFLKETDENNLSISNRILQLYKFQIPYYIGPVTEKSQRDGGNGWVIRKDNGRVFPWNIEEKIDVKATSEAFISRMVRRCTYMNGKQVLPKASLEYESFRVLNEINNLRIDGERIPVTLKQDIYTDLFQKGKKVTKKQLCNYLATRGLIESSEQVTGIDIAINNSLSTYGKFKAIFGEDIKLDHIQHMIEDIVFWCTVYGDSKQFLKEQIEDKYKGKLSPEQMKRILGFKFKDWGNLSKEFFELKGADKSTGEAVSIIRALWENNLNLMELINSSEFDFKEQLADYEANSLKTLSDFEPEDLNDYYFSAPVRRMIWQTTLIIKELVHVLGKEPARIFIEMTREKDASRGRTLSRKKKFEDLYKNVKDENTDWAKVIEHADESGTIRSKKMYLYLTQKGRCMYTGNHIELSDLFNDNLYDIDHIYPRHFVKDDNIDNNLVLVTKEKNAHKSDNYPLEAEIFNKQRNMWTQLRKEGFISEEKYNRLMGRNAFTDEQKAGFIARQLVETSQGTKGVAELFHQLLPNSKIVYAKAGNVSDFRRNRELPKSRLVNDFHHAHDAYLNIVVGNVYYVKFTQNPINYIKNSYNKDMNKNNYNLSRMFDWDVKRGDEVAWIAQKQDGAAGTISTVKKMLSKNTPLMTRLSYEGKGALANETLYSAEKAKGEGYIPFKSSDTKIQDVTKYGGFTSVTGAYFFLVEHDEKKKRIRTIESVPLYLADKIDKDSSELERYCDKLGLVNYDVRVRKIKIGSLLNRNGYFAYLTGKTGKQLILRNATNLCLDKKWTRYIKKIEKYKETNVLDSIITSETMVNLYNELLNKFTVGIYGRRPNPIGEKMDSAKNTFTSYTLDNQCNLIYQILQLSKILGFETDLSLLRTNKQSGKPTREGGMQISKKIDNTTSMYLINQSPTGLFETKIDLQTI

SEQ ID NO: 3041 - protein, 1352 aa, unidentified
  REGION 1..1352: note = Description of Unknown: uncultivated organism sequence
  REGION 1..1352: note = Category: MG91 effectors
  REGION 1..1352: note = Description: MG91-233 effector
MTAFKYYLGLDMGTNSVGWAATDPEYRLLKAKGKDLWGIREFNEASGAVERRTHRISRRRRQREQVRIGILKDYFHDAICEVDPSFFQRLENSKYHEEDKDVEVRYKNNIFNDSNYTDKDYFNEYPTIYHLRNELISSTEKHDVRLVFLALLNMFKHRGHFLNAGLGENNGESNIDNVYFELTELLSELTEYHLSQDIDCKQIEAILSRRDMSRTHKAEELAGVLHVDLKNKPYKELIRGLCGLKFNACVVFPDVQSEEVTKLDICLSESTFDEKSDEIANIIGEDYFEIIMAMKEMFDIGSLASIMKGHNYLSQARVASYTKHKEDLKLLKEVIKKYCGKKEYDKFFNSDADGSYASYVGSYNSKNKERRVGNKRTSEELYKEIKKLLKDAQKEDENVQKILTSIENETFLPKQLTASNGVIPNQVHAREMKKILSNAENYLPFLTEKDETGLSVSERILKLFTFQIPYYVGPTSENSGKNGGNGWVVRREDGQVLPWNIDEKIDMKATSEAFISRMVRRCTYISGEQVLPKASLEYQSYCVLNEINNIKIDGERISVELKQDIYKAVFQKGKKVTKKQLCKYLHTRGIIETEEQVTGVDVSINNALTTYGKFKPIFGEDISKDSVQKMIEDIVFWCTVYGDSKKFLKDRIEEKYGNKLSEEQIKRILGFKFKDWGNLSKKFLELNGADTSTGESISIIRALWNNNLNLMELINSSLYNYKECLAEYQNTMLKTLSEIEAEDLNEYYFSAPVRRIIWQTILVIKELVKVLGCEPERIFVEMTRKPDEHKTRTSSRRNKFEELYKKVKDEATDWMQVIAKAEEDGKIRSKKMYLYLTQKGRCMYTGKHIELDDLFDKNLYDIDHIYPRHFVKDDNIDNNLVLVCKEKNAHKSDHYPIEEEIFLSQKKMWLELRKSGFITEEKYNRLMGRSPFSDEQKAGFIARQLVETSQGTKGVANILRQLLPGSKIVYAKASNVSEFRHTRDDIPKSRLVNDFHHAHDAYLNIVVGNVYYVKFTQNPLNFIKKDYDKYKEDYNLSKMFDWDVKRNGEVAWIAQRKDGEAGTITTVKRMLSRNTPLMTRYSFEGKGGLANETLCSAKKAKGEGYIPFKSSDDKMQDVTKYGGFTKVTGAYFFLVEHTEKKKRIRTIESVPVYLAQKIEQNPDELKKYCEEILGLVDADIRLKKIKIGSLIKRNGYFCYITGKTGNRLSVRNAVNLCLKNEWIKYISKLEKVKEKDAVDEIITKEKNEVLYSELIQKFKHGIFSKRPNPVEDKLEKGSEKFSNLSIKEQCAVLCQILQLAAVLGSECDMTLLGESAHCGKMLISKKIGDEEIYLLNQSVTGLYEKKINLHTV

SEQ ID NO: 3042 - protein, 1359 aa, unidentified
  REGION 1..1359: note = Description of Unknown: uncultivated organism sequence
  REGION 1..1359: note = Category: MG91 effectors
  REGION 1..1359: note = Description: MG91-234 effector
MLEKPYYLGLDMGTNSVGWAVTDQQYNLLKAKGKDLWGIREFAEADTSVERRTHRISRRRRQREQARIGLLNDYFHDAIIAIDPSFFQRLENSKYHLEDKDQNVRYKYNIFNDPDYTDADYYTQYPTIYHLRKELLENPKPHDVRLVYLALLNMFKHRGHFLNSGISDGNNERSLKDAYINFAISVSELTEDYFNQDVDYSTIEGILSSRDLNRTKKAEELSTVLGIDFKNKKYKEYLRAICGLKINAYTLFSDQLPDDTTKIDLCVSDASFDEKSEELVSLIGEDLFQIILNIKEIYDIGSLAGILKGYTYLSQARVAAYDKHKHDLKLLKSSIKKYCTKEEYNNFFNSDADGSYASYIGSFNSGNKERRVGSKRTSEDLYKEIKKLLKGANKSDPAINEIFTSIETESFLPKQLTASNGIIPNQVHSKEMARILTNAENYLPFLKETDENNLSISNRILQLYKFQIPYYIGPVTEKSQRDGGNGWVIRKDNGRVFPWNIEEKIDVKATSEAFISRMVRRCTYMNGKQVLPKASLEYESFRVLNEINNLRIDGERIPVTLKQDIYTDLFQKGKKVTKKQLCNYLATRGLIESSEQVTGIDIAINNSLSTYGKFKAIFGEDIKLDHIQHMIEDIVFWCTVYGDSKQFLKEQIEDKYKGKLSPEQMKRILGFKFKDWGNLSKEFFELKGADKSTGEAVSIIRALWENNLNLMELINSPEFDFKEQLADYEANSLKTLSDFEPEDLNDYYFSAPVRRMIWQTTLIIKELVHVLGKEPARIFIEMTREKDASRGRTLSRKKKFEDLYKNVKDENTDWAKVIEHADESGTIRSKKMYLYLTQKGRCMYTGNHIELSDLFNDNLYDIDHIYPRHFVKDDNIDNNLVLVTKEKNAHKSDNYPLEAEIFNKQRNMWTQLRKEGFISEEKYNRLMGRNAFTDEQKAGFIARQLVETSQGTKGVAELFHQLLPNSKIVYAKAGNVSDFRRNRELPKSRLVNDFHHAHDAYLNIVVGNVYYVKFTQNPINYIKNSYNKDMNKNNYNLSRMFDWDVKREDEVAWIAQKQDGATGTISTVKKMLSKNTPLMTRLSYEGKGALANETLYSAEKAKGEGYIPFKSSDTKIQDVTKYGGFTSVTGAYFFLVEHDEKKKRIRTIESVPLYLADKIDKDSSELERYCDKLGLVNYDIRVRKIKIGSLLNRNGYFAYLTGKTGKQLILRNATNLCLDKKWTRYIKKIEKYKETNVLDSIITSETMVNLYNELLNKFTVGIYGRRPNPIGEKMDSAKNTFTSYTLDNQCNLIYQILQLSKILGFETDLSLLRTNKQSGKPTREGGMQISKKIDNTTSMYLINQSPTGLFETKIDLQTI

SEQ ID NO: 3043 - protein, 1352 aa, unidentified
  REGION 1..1352: note = Description of Unknown: uncultivated organism sequence
  REGION 1..1352: note = Category: MG91 effectors
  REGION 1..1352: note = Description: MG91-235 effector
MTAFKYYLGLDMGTNSVGWAATDPEYRLLKAKGKDLWGIREFNEASGAVERRTHRISRRRRQREQVRIGILKDYFHDAICEVDPSFFRRLENSKYHEEDKDVEVRYKNNIFNDGNYTDKDYFNEYPTIYHLRNELISSTEKHDVRLVFLALLNMFKHRGHFLNAGLGENNGESNIDNAYFELTELLSELTEYHLSQDIDCKQIEAILSRRDMSRTHKAEELAGVLHVDLKNKPYKELIRGLCGLKFNACVVFPDVQSEEVTKLDICLSESSFDEKSDEIANIIGEDYFEIIMAMKEMFDIGSLASIMKGHNYLSQARVASYTKHKEDLKLLKEVIKKYCGKKEYDKFFNSDADGSYASYVGSYNSKNKERRVGNKRTSEELYKEIKKLLKDAPKEDENVQKILTSIENETFLPKQLTASNGVIPNQVHAREMKKILSNAENYLPFLTEKDETGLSVSERILKLFTFQIPYYVGPTSENSGKNGGNGWVVRREDGQVLPWNIDEKIDMKATSEAFISRMVRRCTYISGEQVLPKASLEYQSYCVLNEINNIKIDGERISVELKQDIYKAVFQKGKKVTKKQLCKYLHTRGIIETEEQVTGVDVSINNALTTYGKFKPIFGEDISKDSVQKMIEDIVFWCTVYGDSKKFLKDRIEEKYGNKLSEEQIKRILGFKFKDWGNLSKKFLELNGADTSTGESISIIRALWNNNLNLMELINSSLYNYKECLAEYQNTMLKTLSEIEAEDLNEYYFSAPVRRIIWQTILVIKELVKVLGCEPERIFVEMTRKPDEHKTRTSSRRNKFEELYKKVKDEATDWMQVIAKAEEDGKIRSKKMYLYLTQKGRCMYTGKHIELDDLFDKNLYDIDHIYPRHFVKDDNIDNNLVLVCKEKNAHKSDHYPIEEEIFLSQKKMWLELRKSGFITEEKYNRLMGRSPFSDEQKAGFIARQLVETSQGTKGVANILRQLLPGSKIVYAKASNVSEFRHTRDDIPKSRLVNDFHHAHDAYLNIVVGNVYYVKFTQNPLNFIKKDYDKYKEDYNLSKMFDWDVKRNGEVAWIAQRKDGEAGTITTVKKMLSRNTPLMTRYSFEGKGGLANETLYSAKKAKGEGYIPFKSSDDKMQDVTKYGGFTKVTGAYFFLVEHTEKKKRIRTIESVPVYFVQKIEKNPGELKKYCEEILGLVDADIRLKKIKIGSLIKRNGYFCYITGKTGNRLSVRNAVNLCLKNEWIKYISKLEKVKEKDTIDEIITKEKNEVLYSELIQKFKHCIFSKRPNPVGDKLEKGSEKFSNLSIKDQCAVLCQVLRMAAILGSECDMTLLGESSICGEMKISKKIGDEEIYLINQSVTGLYEKKINLHTV

SEQ ID NO: 3044 - protein, 1358 aa, unidentified
  REGION 1..1358: note = Description of Unknown: uncultivated organism sequence
  REGION 1..1358: note = Category: MG91 effectors
  REGION 1..1358: note = Description: MG91-236 effector
MEKEYYLGLDMGTNSVGWAVTDDAYNLIRFKGKDMWGIREFDEANPAVERRTHRTSRRREQRNAVRMGLIRSYFADEIQKVDSNFYQRLDNSFFHVEDKQDNVKDKNGIFNDKNYKDADYYKQYPTIFHLRKELIEDASQKDVRLVYLAVANMFKHRGHFLLSGIGSESSKQTITDLYNQVSGLITEEYGISLKTDIAGTDFEQVLCSREYSRTRKSEKVCEILEIKNSDKLKKAFVKSMCGLSVKITDVIDDTFTEISDEDKKITFSFVDSDYDEKAGVLEEKLGTDVYDIISKLKEIHDKAQVAEIMKNYQYLSFARVADYEKHKKDLKILKRVVKKYFEPTVYDKLFRSGENGTYSAYVNSFNSGEKSRRNYKERKQEDLYNSIKKLIKSIDNVCDTDIEYIKNEIEKENFLPKQLTFKNGVIPNQIHASELKAILKNAEKYLPFLNEKDESGYTVSERILMLFSFQIPYYVGPVSSNSNGWVKRLEPGQVLPWNIDKKIDLKETSEQFIQRMVRNCTYIAGEKVLPKASLLYENFKVLNEINNLSINGERIAVALKQDLYNTLFLKGKRVTRKQIFNYFHSRGLVEEDSQISGIDIAVNNSLSTYGKFLPLFGEHLKEDKYKKMVDDIVFWCTVYGDSRKFLREQLEEKYSDVIDENQIKRITGMKFKDWGNLSKEFLELSGCCKSTGEMIPLIRAMWETNYNLMELLHSEEFTYSEELEEKQGKIEKVLSEYTIDDLNEEYFSAPVKRMVWQTLLIIKEIEKIMKCPPTRIFVEMTRKDDEKGDNGRKSSRKDQLLALYKKIQSEDKEWKKEMSSRIEDYDKNGALRSKKLYLYFIQKGLDMYTGKPIDLDNLMSANSNYDIDHIYPRHFVKDDNINNNLVLASKPANAEKSDIYPIKDSIYQKMKYTWKVLRDEGLITEEKYKRLTGRNPFTDEQKAGFIARQLVETGQGTKGVADLLTALLPDTKLVYSKAGNVSDFRKRYDIPKSRLINDFHHAHDAYLNIVVGNIYFTKFTSNPLNYIRKECSSKDNKYQYNLGNMYKWDVKRDGKTAWIAAKEGETGTIATVKKILSRNTPTLTRLTIEGHGGIADATLYSHKKAKQDAYIPLKSSDARMADVTKYGGYSSVTTAYLFLVEHEIKGKKIRTLETVPLYLKDRLENSKEKLEEYCRESLGYTNPSVRMKKIKLQSLIKLNGYYMQISGKSIKQFEVRNYVQICLNGKWVDYIHKLEKYQDKGVIDNAITDEKNVELYNILCEKHSVGIFTLRPNPVGDKIKKGYDKFVNLTTEEQIKLLIEIIKLTCVGIVKADLRLIGASEKSGTMKINKNITDAKECFLINQSVTGLYENRIDLLRV

SEQ ID NO: 3045 - protein, 1353 aa, unidentified
  REGION 1..1353: note = Description of Unknown: uncultivated organism sequence
  REGION 1..1353: note = Category: MG91 effectors
  REGION 1..1353: note = Description: MG91-237 effector
MAVFKYYLGLDMGTNSVGWAVTDIQYNILKVKGKDLWGIREFNEASTAVERRTHRVSRRARQRKTVLIGLLKYYFHDEICKKDPYFFQRLDNSKYHLEDKDDEVKYTYNIFNDINYTDADYFKQYPTIFHLRNELIFNPNEHDIRLVYLALLNMFKHRGHFLNDSLIDDDSEMKIDEAYLELANLLSEYTEYYLKTDVNITELENILSDRDESRTKKSEKIVELLEIDSKNKPYKEMIRGLCGLKFNAITIFSDVQLEDGQKLDICLSDASFEEKADEIASILGEDYFQIILSMKRLYDIGSLSEIMKGYSYLSEARVASYKKHKEDLCCLKRVIKKYCNKECYEKIFNSDEDGSYASYVGSFNSNSKQRRVGNKRSIEDLYKEIKKILKAVPQEDADVQRILTSIDNETFLPKQLTASNGVIPNQIHEKEMKKILSNAENYLPFLKEKDEKNQTVSERILMLFTFRIPYYVGPTTENSQKNGGNGWVIRKEAGQVLPWNIEEKIDMKATSEAFISRMIRRCTYISGKPVLPRASLEYQSFCVLNAINNITIDGYRISVELKQDIYNDLFLKGKKVTKKQLCKYLYLRGLITSENQVSGIDIEINNTLSTYKIFKNIFGDDIIYDSTKIMIEDIVFWCTVYGESKKFLRERLCEKYGDKLSQDQIKRILGLKFKDWGNLSKEFLELSGVNKKTNESMSIIKALWENNLNMMELINSDLFDFKEKIVEYQTDLMKTIYNIEVDDLENYYFSAPVKRMVWQTILVVKELVGVLGCEPTRIFIEMTRRHDEITKRTINRKKKFEALYKSVKDEDTDWMNVIADADDTGRIRSKKMYLYLTQKGRCMYTGKHIELSDLFNNNLYDIDHIYPRHFVKDDNIDNNLVLVCKEKNAHKRDIYPLEEQIYSSQKEMWSELKKLGFINEEKYNRLTGRNSFTDEQKAGFIARQLVETSQGTKGVANILQQLLPESKIVYAKASNVSEFRQSRDIPKSRLVNEFHHAHDAYLNIVVGNVYYVKFTQDPLKFIKNDYDKDKINNNYNLSKMFDWDVKRKGEVAWIAQKKNGDVGTIATVKKVLSKNTPLMTRYCFEGRGKISKEERHSAKEAKQVGYLPYKTSDLKIKDVTKYGGFTSITVAYYFVVEHDEKKKRIRTIESVPLYLAAKINSNHEELDKYCKNELGLVNFNIRVRKIRIGSLLKRNGYFFYITGKTGNRLIVRNAVNICFRKEWIKYSSKIEKYQEKKIIDDIITKDKNELFYDEFIKKYENSIFANRPNSILEKLKKAFPVFKESNIEQQCSILYQLLNLSKILGSECDLRLIGESPNCGKMLINKKIGDDDIYLINQSVTGVYENKINLRTV

SEQ ID NO: 3046 - protein, 1352 aa, unidentified
  REGION 1..1352: note = Description of Unknown: uncultivated organism sequence
  REGION 1..1352: note = Category: MG91 effectors
  REGION 1..1352: note = Description: MG91-238 effector
MQEKPYYLGLDMGTNSVGWAVTDQHYNLLKAKGKDLWGIREFIEADTSVERRTHRISRRRRQREQARIGLLNDYFHDAIIAIDPSFFQRLENSKYHLEDKDQNVRYKYNIFNDPDYTDADYYTQYPTIYHLRKELLENPKPHDVRLVYLALLNMFKHRGHFLNSGISDGNNERSLKDAYINFAISVSELTEDYFNQDVDYSTIEGILSSRDLNRTKKAEELSTVLGIDFKNKKYKEYLRAICGLKINAYTLFSDQLPDDTTKIDLCVSDASFDEKSEELVSLIGEDLFQIILNIKEIYDIGSLAGILKGYTYLSQARVAAYDKHKHDLKLLKSSIKKYCTKEEYNNFFNSDADGSYASYIGSFNSGNKERRVGSKRTSEDLYKEIKKLLKGANKSDPAINEIFTSIETESFLPKQLTASNGIIPNQVHSKEMARILTNAENYLPFLKETDENNLSISNRILQLYKFQIPYYIGPVTEKSQRDGGNGWVIRKDNGRVFPWNIEEKIDVKATSEAFISRMVRRCTYMNGKQVLPKASLEYESFRVLNEINNLRIDGERIPVTLKQDIYTDLFQKGKKVTKKQLCNYLATRGLIESSEQVTGIDIAINNSLSTYGKFKAIFGEDIKLDHIQHMIEDIVFWCTVYGDSKQFLKEQIEDKYKGKLSPEQMKRILGFKFKDWGNLSKEFFELKGADKSTGEAVSIIRALWENNLNLMELINSSEFDFKEQLADYEANSLKTLSDFEPEDLNDYYFSAPVRRMIWQTTLIIKELVHVLGKEPARIFIEMTREKDASRGRTLSRKKKFEDLYKNVKDENTDWAKVIEHADESGTIRSKKMYLYLTQKGRCMYTGNHIELSDLFNDNLYDIDHIYPRHFVKDDNIDNNLVLVTKEKNAHKSDNYPLEAEIFNKQRNMWTQLRKEGFISEEKYNRLMGKNAFTDEQKAGFIARQLVETSQGTKGVAELFHQLLPNSKIVYAKAGNVSDFRRNRELPKSRLVNDFHHAHDAYLNIVVGNVYYVKFTQNPINYIKNSYNTDMNKNNYNLSRMFDWDVKRGDEVAWIAQKQDGAAGTISTVKKMLSKNTPLMTRLSYEGKGALANETLYSAEKAKGEGYIPFKSSDTKIQDVTKYGGFTSVTGAYFFLVEHDEKKKRIRTIESVPLYLADKIDKDSSELERYCDKLGLVNYDVRVRKIKIGSLIKYNGYFCYITGKTGYRLIVRNATNLCLTSNWRKYIKKIEKYKETTIIDNVITAEENIKLYNELLNKFTVGIFGRRPNPIGEKMDSARDKFASLSIENQCLALYQILQLTAILGNESDLQLIGASTHAGKMLISKKIGTDEIYLINQSPTGLFETKIDLQTI

SEQ ID NO: 3047 - protein, 1358 aa, unidentified
  REGION 1..1358: note = Description of Unknown: uncultivated organism sequence
  REGION 1..1358: note = Category: MG91 effectors
  REGION 1..1358: note = Description: MG91-239 effector
MEKEYYLGLDMGTNSVGWAVTDDAYNLIRFKGKDMWGIREFDEANPAVERRTHRTSRRREQRNAVRMGLIRSYFADEIQKVDSNFYQRLDNSFFHVEDKQDNVKDKNGIFNDKNYKDADYYKQYPTIFHLRKELIEDASQKDVRLVYLAVANMFKHRGHFLLSGIGSESSKQTITDLYNQVSGLITEEYGISLKTDIAGTDFEQVLCSREYSRTRKSEKVCEILEIKNSDKLKKAFVKSMCGLSVKITDIIDDTFTEISDEDKKITFSFVDSDYDEKAGVLEEKLGTDVYDIISKLKEIHDKAQVAEIMKNYQYLSFARVADYEKHKKDLKILKRIVKKYFEPTIYDKLFRSEENGTYSAYVNSFNSEEKSRRNYKVRKQEDLYNSIKKLLKSVDNVYDTDIEYIKNEMDKENFLPKQLTFKNGVIPNQIHASELKAILKNAEKYLPFLNEKDESGYTVSERILMLFSFQIPYYVGPVSPNSNGWVKRLEPGQVLPWNIDKKIDLKETSEQFIQRMVRNCTYIAGEKVLPKASLLYENFKVLNEINNLSISGERIAVALKQDLYNTLFLKGKRVTRKQIFNYFHSRGLVEEDSQISGIDIAVNNSLSTYGKFLPLFGDHLKEDKYKKMVDDIVFWCTVYGDSRKFLREQLEEKYSDVLDENQIKRITGMKFKDWGNLSKEFLELSGCCKSTGEVMPLIRAMWETNYNLMELLHSEEFTYSEELEEKQGKIEKVLSEYTIDDLNEEYFSAPVKRMVWQTLLIIKEIEKIMKCPPTRIFVEMTRKDDEKGDNGRKSSRKDQLLALYKKIQSEDKEWKKEMSSRIEDYDKNGALRSKKLYLYFIQKGLDMYTGKPIDLDNLMSANSNYDIDHIYPRHFVKDDNINNNLVLASKPANAEKSDIYPIKDSIYQKMKYTWKVLRDEGLITEEKYKRLTGRNPFTDEQKAGFIARQLVETGQGTKGVADLLTALLPDTKLVYSKAGNVSDFRKKYDIPKSRLINDFHHAHDAYLNIVVGNIYFTKFTSNPLNYIRKECSSKDNKYQYNLGNMYKWDVKRDGKTAWIAAKEGETGTIATVKKMLSRNTPTLTRLTIEGHGGIADATLYSHKKAKQDAYIPLKSSDARMADVTKYGGYSSVTTAYLFLVEHEIKGKKIRTLETVPLYLKDRLENSKEKLEEYCGETLGYTNPSVRMKKIKLQSLIKLNGYYMQISGKTNKQFTVRNYVQFCLNSKWVDYIHKLEKYQDKGVIDDAITDEKNVELYNVLCEKHSVGIFTLRPNPVGDKIKKGYDKFVNLTTEEQIKLLIEIIKLTCVGIVSANLTLIGGASISGKMLISKNITDAKECLLINQSVTGLYENRIDLLRV

SEQ ID NO: 3048 - protein, 1358 aa, unidentified
  REGION 1..1358: note = Description of Unknown: uncultivated organism sequence
  REGION 1..1358: note = Category: MG91 effectors
  REGION 1..1358: note = Description: MG91-240 effector
MEKEYYLGLDMGTNSVGWAVTDDAYNLIRFKGKDMWGIREFDEANPAVERRTHRTSRRREQRNAVRMGLIRSYFADEIQKVDSNFYQRLDNSFFHVEDKQDNVKDKNGIFNDKNYKDADYYKQYPTIFHLRKELIEDASQKDVRLVYLAVANMFKHRGHFLLSGIGSESSKQTITDLYNQVTGLITEEYGISLKTDIAGTDFEQVLCSREYSRTRKSEKVCEILEIKNSDKLKKAFVKSMCGLSVKITDIIDDTFTEISDEDKKITFSFVDSDYDEKAGVLEEKLGTDVYDIISKLKEIHDKAQVAEIMKNYQYLSFARVADYEKHKKDLKILKRVVKKYFEPTVYDKLFRSEENGTYSAYVNSFNSGEKSRRNYKERKQEDLYNSIKKLLKSIDNVCDTDIEYIKNEMDKENFLPKQLTFKNGVIPNQIHASELKAILKNAEKYLPFLNEKDESGYTVSERILMLFSFQIPYYVGPVSSNSNGWVKRLEPGQVLPWNIDKKIDLKETSEQFIQRMVRNCTYIAGEKVLPKASLLYENFKVLNEINNLSINGERITVNLKQDLYNTLFLKGKRVTRKQIFNYFHSRGLVEEDSQISGIDIAVNNSLSTYGKFLPLFGEHLKEDKYKKMVDDIVFWCTVYGDSRKFLREQLEEKYSDVLDENQIKRITGMKFKDWGNLSKEFLELSGCCKSTGEVMPLIRAMWETNYNLMELLHSEEFTYSEELEEKQGKIEKVLSEYTIDDLNEEYFSAPVKRMIWQTLLIIKEIEKIMKCPPTRIFVEMTRKDDEKGDNGRKSSRKDQLLALYKKIQSEDKEWKKEMSSRIEDYDKNGALRSKKLYLYFIQKGLDMYTGKPIDLDNLMSANSNYDIDHIYPRHFVKDDNINNNLVLASKPANAEKSDIYPIKDSIYQKMKYTWKVLRDEGLITEEKYKRLTGRNPFTDEQKAGFIARQLVETGQGTKGVADLLTALLPDTKLVYSKAGNVSDFRKRYDIPKSRLINDFHHAHDAYLNIVVGNIYFTKFTSNPLNYIRKECSSKDNKYQYNLGNMYKWDVKRDGKTAWVAPEEGETGTLATVKKMLSRNTPILTRLTIEGHGGIADATLYSHKKAKQDTYIPLKSSDARMADVTKYGGYSSVTTAYLFLVEHEIKGKKIRTLETVPLYLKDRLENSKEKLEEYCRETLGYTNPSVRMKKIKLQSLIKLNGYYMQISGKTNKQFTVRNYVQFCLNSKWVDYIHKLEKYQDKGVIDDAITDEKNVELYNVLCEKHSVGIFTLRPNPVGDKIKKGYDKFVNLTTEEQIKLLIEIIKLTCVGIVSANLTLIGGASISGKMLISKNITDAKECLLINQSVTGLYENRIDLLRV

SEQ ID NO: 3049 - protein, 1352 aa, unidentified
  REGION 1..1352: note = Description of Unknown: uncultivated organism sequence
  REGION 1..1352: note = Category: MG91 effectors
  REGION 1..1352: note = Description: MG91-241 effector
MLEKPYYLGLDMGTNSVGWAVTDQQYNLLKAKGKDLWGIREFAEADTSVERRTHRISRRRRQREQARIGLLNDYFHDAIIAIDPSFFQRLENSKYHLEDKDQNVRYKYNIFNDPDYTDADYYTQYPTIYHLRKELLENPKPHDVRLVYLALLNMFKHRGHFLNSGISDGNNERSLKDAYINFAISVSELTEDYFNQDVDYSTIEGILSSRDLNRTKKAEELSTVLGIDFKNKKYKEYLRAICGLKINAYTLFSDQLPDDTTKIDLCVSDASFDEKSEELVSLIGEDLFQIILNIKEIYDIGSLAGILKGYTYLSQARVAAYDKHKHDLKLLKSSIKKYCTKEEYNNFFNSDADGSYASYIGSFNSGNKERRVGSKRTSEDLYKEIKKLLKGANKSDPAINEIFTSIETESFLPKQLTASNGIIPNQVHSKEMARILTNAENYLPFLKETDENNLSISNRILQLYKFQIPYYIGPVTEKSQRDGGNGWVIRKDNGRVFPWNIEEKIDVKATSEAFISRMVRRCTYMNGKQVLPKASLEYESFRVLNEINNLRIDGERIPVTLKQDIYTDLFQKGKKVTKKQLCNYLATRGLIESSEQVTGIDIAINNSLSTYGKFKAIFGEDIKLDHIQHMIEDIVFWCTVYGDSKQFLKEQIEDKYKGKLSPEQMKRILGFKFKDWGNLSKEFFELKGADKSTGEAVSIIRALWENNLNLMELINSPEFDFKEQLADYEANSLKTLSDFEPEDLNDYYFSAPVRRMIWQTTLIIKELVHVLGKEPARIFIEMTREKDASRGRTLSRKKKFEDLYKNVKDENTDWAKVIEHADESGTIRSKKMYLYLTQKGRCMYTGNHIELSDLFNDNLYDIDHIYPRHFVKDDNIDNNLVLVTKEKNAHKSDNYPLEAEIFNKQRNMWTQLRKEGFISEEKYNRLMGRNAFTDEQKAGFIARQLVETSQGTKGVAELFHQLLPNSKIVYAKAGNVSDFRRNRELPKSRLVNDFHHAHDAYLNIVVGNVYYVKFTQNPINYIKNSYNKDMNKNNYNLSRMFDWDVKRGDEVAWIAQKQDGATGTISTVKKMLSKNTPLMTRLSYEGKGALANETLYSAEKAKGEGYIPFKSSDTKIQDVTKYGGFTSVTGAYFFLVEHDEKKKRIRTIESVPLYLADKIDKDSSELERYCDKLGLVNYDVRVRKIKIGSLIKYNGYFCYITGKTGYRLIVRNATNLCLASNWRKYIKKIEKYKETTIIDNVITAEENIKLYNELLNKFTVGIFGRRPNPIGEKMDSARDKFASLSIENQCLALYQILQLTAILGNESDLQLIGASTHAGKMLISKKIGTDEIYLINQSPTGLFETKIDLQTI

SEQ ID NO: 3050 - protein, 1352 aa, unidentified
  REGION 1..1352: note = Description of Unknown: uncultivated organism sequence
  REGION 1..1352: note = Category: MG91 effectors
  REGION 1..1352: note = Description: MG91-242 effector
MTAFKYYLGLDMGTNSVGWAATDPEYRLLKAKGKDLWGIREFNEASGAVERRTHRISRRRRQREQVRIGILKDYFHDAICEVDPGFFQRLENSKYHEEDKDVEVRYKNNIFNDSNYTDKDYFNEYPTIYHLRNELISSTEKHDVRLVFLALLNMFKHRGHFLNAGLGENNGESNIDNAYFELTELLSELTEYHLSQDIDCKQIEAILSRRDMSRTHKAEELAGVLHVDLKNKPYKELIRGLCGLKFNACVVFPDVQSEEVTKLDICLSESTFDEKSDEIANIIGEDYFEIIMAMKEMFDIGSLASIMKGHNYLSQARVASYTKHKEDLKLLKEVIKKYCGKKEYDKFFNSDADGSYASYVGSYNSKNKERRVGNKRTSEELYKEIKKLLKDAQKEDENVQKILTSIENETFLPKQLTASNGVIPNQVHAREMKKILSNAENYLPFLTEKDETGLSVSERILKLFTFQIPYYVGPTSENSGKNGGNGWVVRREDGQVLPWNIDEKIDMKATSEAFISRMVRRCTYISGEQVLPKASLEYQSYCVLNEINNIKIDGERISVELKQDIYKAVFQKGKKVTKKQLCKYLHTRGIIETEEQVTGVDVSINNALTTYGKFKPIFGEDISKDSVQKMIEDIVFWCTVYGDSKKFLKDRIEEKYGNKLSEEQIKRILGFKFKDWGNLSKKFLELNGADTSTGESISIIRALWNNNLNLMELINSSLYNYKECLAEYQNTMLKTLSEIEAEDLNEYYFSAPVRRMIWQTIHVIKELVKVLGCEPERIFVEMTRKPDEHKTRTSSRRNKFEELYKKVKDETTDWMQVIANAEEDGKIRSKKMYLYLTQKGRCMYTGKHIELDDLFDNNLYDIDHIYPRHFVKDDNIDNNLVLVCKEKNAHKSDHYPIEEEIFLSQKKMWLELRKSGFITEEKYNRLMDRNPFSDEQKAGFIARQLVETSQGTKGVANILRQLLPGSKIVYAKASNVSEFRCTRDDIQKSRLVNDFHHAHDAYLNIVVGNVYYVKFTQNPLNFIKKDYDKYKEDYNLSKMFDWDVKRNGEVAWIAQRKDGAAGTITTVKRMLSRNTPLMTRYSFDGKGGLTNETLYSAKKAKGEGYIPFKSSDDKMQDVTKYGGFTSVTGAYFFLVEHTEKKKRIRTIESVPVYLAQKIEQNPDELKKYCEEILGLIDADIRLKKIKIGSLIKRNGYFCYITGKTVNRLIVRNAVNLCLKNEWIKYISKLEKVKEKDAVDKIITKEKNEVLYSELIQKFKHGIFSKRPNPVGDKLEKDSEKFNNLSIKDQCAVLCQVLRMAAILGSECDMTLLGDSPNCGKMLISKKIGDEEIYLINQSVTGLYEKKINLHTV

SEQ ID NO: 3051 - protein, 1358 aa, unidentified
  REGION 1..1358: note = Description of Unknown: uncultivated organism sequence
  REGION 1..1358: note = Category: MG91 effectors
  REGION 1..1358: note = Description: MG91-243 effector
MEKEYYLGLDMGTNSVGWAVTDDAYNLIRFKGKDMWGIREFDEANPAVERRTHRTSRRREQRNAVRMGLIRSYFADEIQKVDSNFYQRLDNSFFHVEDKQDNVKDKNGIFNDKNYKDADYYKQYPTIFHLRKELIEDASQKDVRLVYLAVANMFKHRGHFLLSGIGSESSKQTITDLYNQVSGLITEEYGISLKTDIAGTDFEQVLCSREYSRTRKSEKVCEILEIKNSDKLKKAFVKSMCGLSVKITDVIDDTFTEISDEDKKITFSFVDSDYDEKAGVLEEKLGTDVYDIISKLKEIHDKAQVAEIMKNYQYLSFARVADYEKHKKDLKILKRVVKKYFEPTVYDKLFRSGENGTYSAYVNSFNSGEKSRRNYKERKQEDLYNSIKKLLKSIDNVCDTDIEYIKNEIEKENFLPKQLTFKNGVIPNQIHASELKAILKNAEKYLPFLNEKDESGYTVSERILMLFSFQIPYYVGPVSPNSNGWVKRLEPGQVLPWNIDKKIDLKETSEQFIQRMVRNCTYIAGEKVLPKASLLYENFKVLNEINNLSINGERIAVALKQDLYNTLFLKGKRVTRKQIFNYFHSRGLVEEDSQISGIDIAVNNSLSTYGKFLPLFGEHLKEDKYKKMVDDIVFWCTVYGDSRKFLREQLEEKYSDVLDENQIKRITGMKFKDWGNLSKEFLELLGCCKSTGEMIPLIRAMWETNYNLMELLHSEEFTYSEELEEKQGKIEKVLSEYTIDDLNEEYFSAPVKRMVWQTLLIIKEIEKIMKCPPTRIFVEMTRKDDEKGDNGRKSSRKDQLLALYKKIQSEDKEWKKEMSSRIEDYDKNGALRSKKLYLYFIQKGLDMYTGKPIDLDNLMSANSNYDIDHIYPRHFVKDDNINNNLVLASKPANAEKSDIYPIKDSIYQKMKYTWKVLRDEGLITEEKYKRLTGRNPFTDEQKAGFIARQLVETGQGTKGVADLLTALLPDTKLVYSKAGNVSDFRKRYDIPKSRLINDFHHAHDAYLNIVVGNIYFTKFTSNPLNYIRKECSSKDNKYQYNLGNMYKWDVKRDGKTAWIAAKEGETGTIATVKKILSRNTPTLTRLTIEGHGGIADATLYSHKKAKQDAYIPLKSSDARMADVTKYGGYSSVTTAYLFLVEHEIKGKKIRTLETVPLYLKDRLENSKEKLEEYCRETLGYTNPSVRMKKIKLQSLIKLNGYYMQISGKTNKQFTVRNYVQFCLNSKWVDYIHKLEKYQDKGVIDDAITDEKNVELYNVLCEKHSVGIFTLRPNPVGDKIKKGYDKFVNLTTEEQIKLLIEIIKLTCVGIVSANLTLIGGAAISGKMLISKNITDAKECLLINQSVTGLYENRIDLLRV

SEQ ID NO: 3052 - protein, 1352 aa, unidentified
  REGION 1..1352: note = Description of Unknown: uncultivated organism sequence
  REGION 1..1352: note = Category: MG91 effectors
  REGION 1..1352: note = Description: MG91-244 effector
MTAFKYYLGLDMGTNSVGWAATDPEYRLLKAKGKDLWGIREFNEASGAVERRTHRISRRRRQREQVRIGILKDYFHDAICEVDPSFFQRLENSKYHEEDKDVEVRYKNNIFNDSNYTDKDYFNEYPTIYHLRNELISSTEKHDVRLVFLALLNMFKHRGHFLNAGLGENNGESNIDNAYFELTELLSELTEYHLSQDIDCKQIEAILSRRDMSRTHKAEELAGVLHVDLKNKPYKELIRGLCGLKFNACVVFPDVQSEEVTKLDICLSESTFDEKSDEIANIIGEDYFEIIMAMKEMFDIGSLASIMKGHNYLSQARVASYTKHKEDLKLLKEVIKKYCGKKEYDKFFNSDADGSYASYVGSYNSKNKERRVGNKRTSEELYKEIKKLLKDAQKEDENVQKILTSIENETFLPKQLTASNGVIPNQVHAREMKKILSNAENYLPFLTEKDETGLSVSERILKLFTFQIPYYVGPTSENSGKNGGNGWVVRREDGQVLPWNIDEKIDMKATSEAFISRMVRRCTYISGEQVLPKASLEYQSYCVLNEINNIKIDGERISVELKQDIYKAVFQKGKKVTKKQLCKYLHTRGIIETEEQVTGVDVSINNALTTYGKFKPIFGEDISKDSVQKMIEDIVFWCTVYGDSKKFLKDRIEEKYGNKLSEEQIKRILGFKFKDWGNLSKKFLELNGADTSTGESISIIRALWNNNLNLMELINSSLYNYKECLAEYQNTMLKTLSEIEAEDLNEYYFSAPVRRMIWQTILVIKELVKVLGCEPERIFVEMTRKPDEHKTRTSSRRNKFEELYKKVKDETTDWMQVIANAEEDGKIRSKKMYLYLTQKGRCMYTGKHIELDDLFDNNLYDIDHIYPRHFVKDDNIDNNLVLVCKEKNAHKSDHYPIEEEIFLSQKKMWLELRKSGFITEEKYNRLMDRNPFSDEQKAGFIARQLVETSQGTKGVANILRQLLPGSKIVYAKASNVSEFRCTRDDIQKSRLVNDFHHAHDAYLNIVVGNVYYVKFTQNPLNFIKKDYDKYKEDYNLSKMFDWDVKRNGEVAWIAQRKDGAAGTITTVKRMLSRNTPLMTRYSFDGKGGLTNETLYSAKKAKGEGYIPFKSSDDKMQDVTKYGGFTSVTGAYFFLVEHTEKKKRIRTIESVPVYLAQKIEQNPDELKKYCEEILGLIDADIRLKKIKIGSLIKRNGYFCYITGKTVNRLIVRNAVNLCLKNEWIKYISKLEKVKEKDAVDKIITKEKNEVLYSELIQKFKHGIFSKRPNPVGDKLEKDSEKFNNLSIKDQCAVLCQVLRMAAILGSECDMTLLGDSPNCGKMLISKKIGDEEIYLINQSVTGLYEKKINLHTV

SEQ ID NO: 3053 - protein, 1352 aa, unidentified
  REGION 1..1352: note = Description of Unknown: uncultivated organism sequence
  REGION 1..1352: note = Category: MG91 effectors
  REGION 1..1352: note = Description: MG91-245 effector
MTAFKYYLGLDMGTNSVGWAATDPEYRLLKAKGKDLWGIREFNEASGAVERRTHRISRRRRQREQVRIGILKDYFHDAICEVDPSFFRRLENSKYHEEDKDVEVRYKNNIFNDGNYTDKDYFNEYPTIYHLRNELISSTEKHDVRLVFLALLNMFKHRGHFLNAGLGENNGESNIDNAYFELTELLSELTEYHLSQDIDCKQIEAILSRRDMSRTHKAEELAGVLHVDLKNKPYKELIRGLCGLKFNACVVFPDVQSEEVTKLDICLSESSFDEKSDEIANIIGEDYFEIIMAMKEMFDIGSLASIMKGHNYLSQARVASYTKHKEDLKLLKEVIKKYCGKKEYDKFFNSDADGSYASYVGSYNSKNKERRVGNKRTSEELYKEIKKLLKDAPKEDENVQKILTSIENETFLPKQLTASNGVIPNQVHAREMKKILSNAENYLPFLTEKDETGLSVSERILKLFTFQIPYYVGPTSENSGKNGGNGWVVRREDGQVLPWNIDEKIDMKATSEAFISRMVRRCTYISGEQVLPKASLEYQSYCVLNEINNIKIDGERISVELKQDIYKAVFQKGKKVTKKQLCKYLHTRGIIETEEQVTGVDVSINNALTTYGKFKPIFGEDISKDSVQKMIEDIVFWCTVYGDSKKFLKDRIEEKYGNKLSEEQIKRILGFKFKDWGNLSKKFLELNGADTSTGESISIIRALWNNNLNLMELINSSLYNYKECLAEYQNTMLKTLSEIEAEDLNEYYFSAPVRRIIWQTILVIKELVKVLGCEPERIFVEMTRKPDEHKTRTSSRRNKFEELYKKVKDEATDWMQVIAKAEEDGKIRSKKMYLYLTQKGRCMYTGKHIELDDLFDKNLYDIDHIYPRHFVKDDNIDNNLVLVCKEKNAHKSDHYPIEEEIFLSQKKMWLELRKSGFITEEKYNRLMGRSPFSDEQKAGFIARQLVETSQGTKGVANILRQLLPGSKIVYAKASNVSEFRHTRDDIPKSRLVNDFHHAHDAYLNIVVGNVYYVKFTQNPLNFIKKDYDKYKEDYNLSKMFDWDVKRNGEVAWIAQRKDGEAGTITTVKRMLSRNTPLMTRYSFEGKGGLANETLCSAKKAKGEGYIPFKSSDDKMQDVTKYGGFTKVTGAYFFLVEHTEKKKRIRTIESVPVYLAQKIEQNPDELKKYCEEILGLVDADIRLKKIKIGSLIKRNGYFCYITGKTGNRLSVRNAVNLCLKNEWIKYISKLEKVKEKDAVDEIITKEKNEVLYSELIQKFKHGIFSKRPNPVEDKLEKGSEKFSNLSIKEQCAVLCQILQLAAVLGSECDMTLLGESAHCGKMLISKKIGDEEIYLLNQSVTGLYEKKINLHTV

SEQ ID NO: 3054 - protein, 1352 aa, unidentified
  REGION 1..1352: note = Description of Unknown: uncultivated organism sequence
  REGION 1..1352: note = Category: MG91 effectors
  REGION 1..1352: note = Description: MG91-246 effector
MTAFKYYLGLDMGTNSVGWAATDPGYRLLKAKGKDLWGIREFNEASGAVERRTHRISRRRRQREQVRIGILKDYFHDAICEVDPGFFQRLENSKYHEEDKDVEVRYKNNIFNDSNYTDKDYFNEYPTIYHLRNELISSTEKHDVRLVFLALLNMFKHRGHFLNAGLGENNGESNIDNAYFELTELLSELTEYHLSQDIDCKQIEAILSRRDMSRTHKAEELAGVLHVDLKNKPYKELIRGLCGLKFNACVVFPDVQSEEVTKLDICLSESTFDEKSDEIANIIGEDYFEIIMAMKEMFDIGSLASIMKGHNYLSQARVASYTKHKEDLKLLKEVIKKYCSKKEYDKFFNSDADGSYASYVGSYNSKNKERRVGNKRTSEELYKEIKKLLKDAQKEDENVQKILTSIENETFLPKQLTASNGVIPNQVHAREMKKILSNAENYLPFLTEKDETGLSVSERILKLFTFQIPYYVGPTSENSGKNGGNGWVVRREDGQVLPWNIDEKIDMKATSEAFISRMVRRCTYISGEQVLPKASLEYQSYCVLNEINNIKIDGERISVELKQDIYKAVFQKGKKVTKKQLCKYLHTRGIIETEEQVTGVDVSINNALTTYGKFKPIFGEDISKDSVQKMIEDIVFWCTVYGDSKKFLKDRIEEKYGNKLSEEQIKRILGFKFKDWGNLSKKFLELNGADTSTGESISIIRALWNNNLNLMELINSSLYNYKECLAEYQNTMLKTLSEIEAEDLNEYYFSAPVRRMIWQTILVIKELVKVLGCEPERIFVEMTRRPDEHKTRTSSRRNKFEELYKKVKDETTDWMQVIANAEEDGKIRSKKMYLYLTQKGRCMYTGKHIELDDLFDNNLYDIDHIYPRHFVKDDNIDNNLVLVCKEKNAHKSDHYPIEEEIFLSQKKMWLELRKSGFITEEKYNRLMGRSPFSDEQKAGFIARQLVETSQGTKGVANILRQLLPGSKIVYAKASNVSEFRCTRDDIQKSRLVNDFHHAHDAYLNIVVGNVYYVKFTQNPLNFIKKDYDKYKEDYNLSKMFDWDVKRNGEVAWIAQRKDGAAGTITTVKRMLSRNTPLMTRYSFDGKGGLTNETLYSAKKAKGEGYIPFKSSDDKMQDVTKYGGFTSVTGAYFFLVEHTEKKKRIRTIELVPVYLAQKIEQNPDELKKYCEEILGLIDADIRLKKIKIGSLIKRNGYFCYITGKTGNRLIVRNAVNLCLKNEWIKYISKLEKVKEKDAVDKIITKEKNEVLYSELIQKFKHGIFSKRPNPVGDKLEKDSEKFNNLSIKDQCAVLCQVLRMAAILGSECDMTLLGDSPNCGKMLISKKIGDEEIYLINQSVTGLYEKKINLHTV

SEQ ID NO: 3055 - protein, 1352 aa, unidentified
  REGION 1..1352: note = Description of Unknown: uncultivated organism sequence
  REGION 1..1352: note = Category: MG91 effectors
  REGION 1..1352: note = Description: MG91-247 effector
MTAFKYYLGLDMGTNSVGWAATDPEYRLLKAKGKDLWGIREFNEASGAVERRTHRISRRRRQREQVRIGILKDYFHDAICEVDPSFFRRLENSKYHEEDKDVEVRYKNNIFNDGNYTDKDYFNEYPTIYHLRNELISSTEKHDVRLVFLALLNMFKHRGHFLNAGLGENNGESNIDNAYFELTELLSELTEYHLSQDIDCKQIEAILSRRDMSRTHKAEELAGVLHVDLKNKPYKELIRGLCGLKFNACVVFPDVQSEEVTKLDICLSESSFDEKSDEIANIIGEDYFEIIMAMKEMFDIGSLASIMKGHNYLSQARVASYTKHKEDLKLLKEVIKKYCGKKEYDKFFNSDADGSYASYVGSYNSKNKERRVGNKRTSEELYKEIKKLLKDAPKEDENVQKILTSIENETFLPKQLTASNGVIPNQVHAREMKKILSNAENYLPFLTEKDETGLSVSERILKLFTFQIPYYVGPTSENSGKNGGNGWVVRREDGQVLPWNIDEKIDMKATSEAFISRMVRRCTYISGEQVLPKASLEYQSYCVLNEINNIKIDGERISVELKQDIYKAVFQKGKKVTKKQLCKYLHTRGIIETEEQVTGVDVSINNALTTYGKFKPIFGEDISKDSVQKMIEDIVFWCTVYGDSKKFLKDRIEEKYGNKLSEEQIKRILGFKFKDWGNLSKKFLELNGADTSTGESISIIRALWNNNLNLMELINSSLYNYKECLAEYQNTMLKTLSEIEAEDLNDYYFSAPVRRIIWQTILVIKELVKVLGCEPERIFVEMTRKPDEHKTRTSSRRNKFEELYKKVKDEATDWMQVIAKAEEDGKIRSKKMYLYLTQKGRCMYTGKHIELDDLFDKNLYDIDHIYPRHFVKDDNIDNNLVLVCKEKNAHKSDHYPIEEEIFLSQKKMWLELRKSGFITEEKYNRLMGRSPFSDEQKAGFIARQLVETSQGTKGVANILRQLLPGSKIVYAKASNVSEFRHTRDDIPKSRLVNDFHHAHDAYLNIVVGNVYYVKFTQNPLNFIKKDYDKYKEDYNLSKMFDWDVKRNGEVAWIAQRKDGEAGTITTVKRMLSRNTPLMTRYSFEGKGGLANETLCSAKKAKGEGYIPFKSSDDKMQDVTKYGGFTKVTGAYFFLVEHTEKKKRIRTIESVPVYLAQKIEQNPDELKKYCEEILGLVDADIRLKKIKIGSLIKRNGYFCYITGKTGNRLSVRNAVNLCLKNEWIKYISKLEKVKEKDAVDEIITKEKNEVLYSELIQKFKHGIFSKRPNPVEDKLEKGSEKFSNLSIKEQCAVLCQILQLAAVLGSECDMTLLGESAHCGKMLISKKIGDEEIYLLNQSVTGLYEKKINLHTV

SEQ ID NO: 3056 - protein, 1352 aa, unidentified
  REGION 1..1352: note = Description of Unknown: uncultivated organism sequence
  REGION 1..1352: note = Category: MG91 effectors
  REGION 1..1352: note = Description: MG91-248 effector
MTAFKYYLGLDMGTNSVGWAATDPEYRLLKAKGKDLWGIREFNEASGAVERRTHRISRRRRQREQVRIGILKDYFHDAICEVDPSFFRRLENSKYHEEDKDVEVRYKNNIFNDGNYTDKDYFNEYPTIYHLRNELISSTEKHDVRLVFLALLNMFKHRGHFLNAGLGENNGESNIDNAYFELTELLSELTEYHLSQDIDCKQIEAILSRRDMSRTHKAEELAGVLHVDLKNKPYKELIRGLCGLKFNACVVFPDVQSEEVTKLDICLSESSFDEKSDEIANIIGEDYFEIIMAMKEMFDIGSLASIMKGHNYLSQARVASYTKHKEDLKLLKEVIKKYCGKKEYDKFFNSDADGSYASYVGSYNSKNKERRVGNKRTSEELYKEIKKLLKDAPKEDENVQKILTSIENETFLPKQLTASNGVIPNQVHAREMKKILSNAENYLPFLTEKDETGLSVSERILKLFTFQIPYYVGPTSENSGKNGGNGWVVRREDGQVLPWNIDEKIDMKATSEAFISRMVRRCTYISGEQVLPKASLEYQSYCVLNEINNIKIDGERISVELKQDIYKAVFQKGKKVTKKQLCKYLHTRGIIETEEQVTGVDVSINNALTTYGKFKPIFGEDISKDSVQKMIEDIVFWCTVYGDSKKFLKDRIEEKYGNKLSEEQIKRILGFKFKDWGNLSKKFLELNGADTSTGESISIIRALWNNNLNLMELINSSLYNYKECLAEYQNTMLKTLSEIEAEDLNEYYFSAPVRRIIWQTILVIKELVKVLGCEPERIFVEMTRKPDEHKTRTSSRRNKFEELYKKVKDEATDWMQVIAKAEEDGKIRSKKMYLYLTQKGRCMYTGKHIELDDLFDKNLYDIDHIYPRHFVKDDNIDNNLVLVCKEKNAHKSDHYPIEEEIFLSQKKMWLELRKSGFITEEKYNRLMGRSPFSDEQKAGFIARQLVETSQGTKGVANILRQLLPGSKIVYAKASNVSEFRHTRDDIPKSRLVNDFHHAHDAYLNIVVGNVYYVKFTQNPLNFIKKDYDKYKEDYNLSKMFDWDVKRNGEVAWIAQRKDGEAGTITTVKRMLSRNTPLMTRYSFEGKGGLANETLCSAKKAKGEGYIPFKSSDDKMQDVTKYGGFTKVTGAYFFLVEHAEKKKRIRTIESVPVYLAQKIEQNPDELKKYCEEILGLVDADIRLKKIKIGSLIKRNGYFCYITGKTGNRLSVRNAVNLCLKNEWIKYISKLEKVKEKDAVDEIITKEKNEVLYSELIQKFKHGIFSKRPNPVEDKLEKGSEKFSNLSIKEQCAVLCQILQLAAVLGSECDMTLLGESAHCGKMLISKKIGDEEIYLLNQSVTGLYEKKINLHTV

SEQ ID NO: 3057 - protein, 1352 aa, unidentified
  REGION 1..1352: note = Description of Unknown: uncultivated organism sequence
  REGION 1..1352: note = Category: MG91 effectors
  REGION 1..1352: note = Description: MG91-249 effector
MTAFKYYLGLDMGTNSVGWAATDPEYRLLKAKGKDLWGIREFNEASGAVERRTHRISRRRRQREQVRIGILKDYFHDAICEVDPGFFRRLENSKYHEEDKDVEVRYKNNIFNDSNYTDKDYFNEYPTIYHLRNELISSTEKHDVRLVFLALLNMFKHRGHFLNAGLGENNGESNIDNAYFELTELLSELTEYHLSQDIDCKQIEAILSRRDMSRTHKAEELAGVLHVDLKNKPYKELIRGLCGLKFNACVVFPDVQSEEVTKLDICLSESTFDEKSDEIANIIGEDYFEIIMAMKEMFDIGSLASIMKGHNYLSQARVASYTKHKEDLKLLKEVIKKYCGKKEYDKFFNSDADGSYASYVGSYNSKNKERRVGNKRTSEELYKEIKKLLKDAQKEDENVQKILTSIENETFLPKQLTASNGVIPNQVHAREMKKILSNAENYLPFLTEKDETGLSVSERILKLFTFQIPYYVGPTSENSGKNGGNGWVVRREDGQVLPWNIDEKIDMKATSEAFISRMVRRCTYISGEQVLPKASLEYQSYCVLNEINNIKIDGERISVELKQDIYKAVFQKGKKVTKKQLCKYLHTRGIIETEEQVTGVDVSINNALTTYGKFKPIFGEDISKDSVQKMIEDIVFWCTVYGDSKKFLKDRIEEKYGNKLSEEQIKRILGFKFKDWGNLSKKFLELNGADTSTGESISIIRALWNNNLNLMELINSSLYNYKECLAEYQNTMLKTLSEIEAEDLNEYYFSAPVRRMIWQTILVIKELVKVLGCEPERIFVEMTRRPDEHKTRTSSRRNKFEELYKKVKDEATDWMQVIAKAEEDGKIRSKKMYLYLTQKGRCMYTGKHIELDDLFDKNLYDIDHIYPRHFVKDDNIDNNLVLVCKEKNAHKSDHYPIEEEIFLSQKKMWLELRKSGFITEEKYNRLMGRSPFSDEQKAGFIARQLVETSQGTKGVANILRQLLPGSKIVYAKASNVSEFRHTRDDIPKSRLVNDFHHAHDAYLNIVVGNVYYVKFTQNPLNFIKKDYDKYKEDYNLSKMFDWDVKRNGEVAWIAQRKDGEAGTITTVKKMLSRNTPLMTRYSFEGKGGLANETLYSAKKAKGEGYIPFKSSDDKMQDVTKYGGFTKVTGAYFFLVEHTEKKKRIRTIESVPVYFVQKIEKNPGELKKYCEEILGLVDADIRLKKIKIGSLIKRNGYFCYITGKTGNRLSVRNAVNLCLKNEWIKYISKLEKVKEKDTIDEIITKEKNEVLYSELIQKFKHCIFSKRPNPVGDKLEKGSEKFSNLSIKDQCAVLCQVLRMAAILGSECDMTLLGESSICGEMKISKKIGDEEIYLINQSVTGLYEKKINLHTV

SEQ ID NO: 3058 - protein, 1352 aa, unidentified
  REGION 1..1352: note = Description of Unknown: uncultivated organism sequence
  REGION 1..1352: note = Category: MG91 effectors
  REGION 1..1352: note = Description: MG91-250 effector
MTAFKYYLGLDMGTNSVGWAATDPEYRLLKAKGKDLWGIREFNEASGAVERRTHRISRRRRQREQVRIGILKDYFHDAICEVDPSFFRRLENSKYHEEDKDVEVRYKNNIFNDGNYTDKDYFNEYPTIYHLRNELISSTEKHDVRLVFLALLNMFKHRGHFLNAGLGENNGESNIDNAYFELTELLSELTEYHLSQDIDCKQIEAILSRRDMSRTHKAEELAGVLHVDLKNKPYKELIRGLCGLKFNACVVFPDVQSEEVTKLDICLSESSFDEKSDEIANIIGEDYFEIIMAMKEMFDIGSLASIMKGHNYLSQARVASYTKHKEDLKLLKEVIKKYCGKKEYDKFFNSDADGSYASYVGSYNSKNKERRVGNKRTSEELYKEIKKLLKDAPKEDENVQKILTSIENETFLPKQLTASNGVIPNQVHAREMKKILSNAENYLPFLTEKDETGLSVSERILKLFTFQIPYYVGPTSENSGKNGGNGWVVRREDGQVLPWNIDEKIDMKATSEAFISRMVRRCTYISGEQVLPKASLEYQSYCVLNEINNIKIDGERISVELKQDIYKAVFQKGKKVTKKQLCKYLHTRGIIETEEQVTGVDVSINNALTTYGKFKPIFGEDISKDSVQKMIEDIVFWCTVYGDSKKFLKDRIEEKYGNKLSEEQIKRILGFKFKDWGNLSKKFLELNGADTSTGESISIIRALWNNNLNLMELINSSLYNYKECLAEYQNTMLKTLSEIEAEDLNEYYFSAPVRRMIWQTILVIKELVKVLGCEPERIFVEMTRRPDEHKTRTSSRRNKFEELYKKVKDEATDWMQVIAKAEEDGKIRSKKMYLYLTQKGRCMYTGKHIELDDLFDKNLYDIDHIYPRHFVKDDNIDNNLVLVCKEKNAHKSDHYPIEEEIFLSQKKMWLELRKSGFITEEKYNRLMGRSPFSDEQKAGFIARQLVETSQGTKGVANILRQLLPGSKIVYAKASNVSEFRHTRDDIPKSRLVNDFHHAHDAYLNIVVGNVYYVKFTQNPLNFIKKDYDKYKEDYNLSKMFDWDVKRNGEVAWIAQRKDGEAGTITTVKRMLSRNTPLMTRYSFEGKGGLANETLCSAKKAKGEGYIPFKSSDDKMQDVTKYGGFTKVTGAYFFLVEHTEKKKRIRTIESVPVYLAQKIEQNPDELKKYCKEILGLVDADIRLKKIKIGSLIKRNGYFCYITGKTGNRLSVRNAVNLCLKNEWIKYISKLEKVKEKDAVDEIITKEKNEVLYSELIQKFKHGIFSKRPNPVEDKLEKGSEKFSNLSIKEQCAVLCQILQLAAVLGSECDMTLLGESAHCGKMLISKKIGDEEIYLLNQSVTGLYEKKINLHTV

SEQ ID NO: 3059 - protein, 1353 aa, unidentified
  REGION 1..1353: note = Description of Unknown: uncultivated organism sequence
  REGION 1..1353: note = Category: MG91 effectors
  REGION 1..1353: note = Description: MG91-251 effector
MAVFKYYLGLDMGTNSVGWAVTDIQYNILKVKGKDLWGIREFNEASTAVERRTHRVSRRARQRKTVLIGLLKYYFHDEICKKDPYFFQRLDNSKYHLEDKDDEVKYTYNIFNDINYTDADYFKQYPTIFHLRNELIFNPNEHDIRLVYLALLNMFKHRGHFLNDSLIDDDSEMKIDEAYLELANLLSEYTEYYLKTDVNITELENILSDRDESRTKKSEKIVELLEIDSKNKPYKEMIRGLCGLKFNAITIFSDVQLEDGQKLDICLSDASFEEKADEIASILGEDYFQIILSMKRLYDIGSLSEIMKGYSYLSEARVASYKKHKEDLCCLKRVIKKYCNKECYEKIFNSDEDGSYASYVGSFNSNSKQRRVGNKRSIEDLYKEIKKILKAVPQEDADVQRILTSIDNETFLPKQLTASNGVIPNQIHEKEMKKILSNAENYLPFLKEKDEKNQTVSERILMLFTFRIPYYVGPTTENSQKNGGNGWVIRKEAGQVLPWNIEEKIDMKATSEAFISRMIRRCTYISGKPVLPRASLEYQSFCVLNAINNITIDGYRISVELKQDIYNDLFLKGKKVTKKQLCKYLYLRGLITSENQVSGIDIEINNTLSTYKIFKNIFGDDIIYDSTKIMIEDIVFWCTVYGESKKFLRERLCEKYGDKLSQNQIKRILGLKFKDWGNLSKEFLELSGVNKKTNESMSIIKALWENNLNMMELINSDLFDFKEKIVEYQTDLMKTIYNIEVDDLENYYFSAPVKRMVWQTILVVKELVGVLGCEPTRIFIEMTRRHDEITKRTINRKKKFEALYKSVKDEDTDWMNVIADADDTGRIRSKKMYLYLTQKGRCMYTGKHIELSDLFNNNLYDIDHIYPRHFVKDDNIDNNLVLVCKEKNAHKRDIYPLEEQIYSSQKGMWLELKKLGFINEEKYNRLTGRNSFTDEQKAGFIARQLVETSQGTKGVANILQQLLPESKIVYAKASNVSEFRQSRDIPKSRLVNEFHHAHDAYLNIVVGNVYYVKFTQDPLKFIKNDYDKDKINNNYNLSKMFDWDVKRKGEVAWIAQKKNGDVGTIATVKKVLSKNTPLMTRYCFEGRGKISKEERHSAKEAKQVGYLPYKTSDLKIKDVTKYGGFTSITVAYYFVVEHDEKKKRIRTIESVPLYLAAKINSNHEELDKYCKNELGLVNFNIRVRKIRIGSLLKQNGYFFYITGKTGNRLIVRNAVNICFRKEWIKYSSKIEKYQEKKIIDDIITKDKNELFYDEFIKKYENSIFANRPNSILEKLKKAFPVFKESNIEQQCSILYQLLNLSKILGSECDLRLIGESPNCGKMLINKKIGDDDIYLINQSVTGLYENKINLRTV

SEQ ID NO: 3060 - protein, 1352 aa, unidentified
  REGION 1..1352: note = Description of Unknown: uncultivated organism sequence
  REGION 1..1352: note = Category: MG91 effectors
  REGION 1..1352: note = Description: MG91-252 effector
MTAFKYYLGLDMGTNSVGWAATDPGYRLLKAKGKDLWGIREFNEASGAVERRTHRISRRRRQREQVRIGILKDYFHDAICEVDPGFFQRLENSKYHEEDKDVEVRYKNNIFNDSNYTDKDYFNEYPTIYHLRNELISSTEKHDVRLVFLALLNMFKHRGHFLNAGLGENNGESNIDNAYFELTELLSELTEYHLSQDIDCKQIEAILSRRDMSRTHKAEELAGVLHVDLKNKPYKELIRGLCGLKFNACVVFPDVQSEEVTKLDICLSESTFDEKSDEIANIIGEDYFEIIMAMKEMFDIGSLASIMKGHNYLSQARVASYTKHKEDLKLLKEVIKKYCSKKEYDKFFNSDADGSYASYVGSYNSKNKERRVGNKRTSEELYKEIKKLLKDAQKEDENVQKILTSIENETFLPKQLTASNGVIPNQVHAREMKKILSNAENYLPFLTEKDETGLSVSERILKLFTFQIPYYVGPTSENSGKNGGNGWVVRREDGQVLPWNIDEKIDMKATSEAFISRMVRRCTYISGEQVLPKASLEYQSYCVLNEINNIKIDGERISVELKQDIYKAVFQKGKKVTKKQLCKYLHTRGIIETEEQVTGVDVSINNALTTYGKFKPIFGEDISKDSVQKMIEDIVFWCTVYGDSKKFLKDRIEEKYGNKLSEEQIKRILGFKFKDWGNLSKKFLELNGADTSTGESISIIRALWNNNLNLMELINSSLYNYKECLAEYQNTMLKTLSEIEAEDLNEYYFSAPVRRMIWQTILVIKELVKVLGCEPERIFVEMTRKPDEHKTRTSSRRNKFEELYKKVKDETTDWMQVIANAEEDGKIRSKKMYLYLTQKGRCMYTGKHIELDDLFDNNLYDIDHIYPRHFVKDDNIDNNLVLVCKEKNAHKSDHYPIEEEIFLSQKKMWLELRKSGFITEEKYNRLMDRNPFSDEQKAGFIARQLVETSQGTKGVANILRQLLPGSKIVYAKASNVSEFRCTRDDIQKSRLVNDFHHAHDAYLNIVVGNVYYVKFTQNPLNFIKKDYDKYKEDYNLSKMFDWDVKRNGEVAWIAQRKDGAAGTITTVKRMLSRNTPLMTRYSFDGKGGLTNETLYSAKKAKGEGYIPFKSSDDKMQDVTKYGGFTSVTGAYFFLVEHTEKKKRIRTIESVPVYLAQKIEQNPDELKKYCEEILGLIDADIRLKKIKIGSLIKRNGYFCYITGKTGNRLIVRNAVNLCLKNEWIKYISKLEKVKEKDAVDKIITKEKNEVLYSELIQKFKHGIFSKRPNPVGDKLEKDSEKFNNLSIKDQCAVLCQVLRMAAILGSECDMTLLGDSPNCGKMLISKKIGDEEIYLINQSVTGLYEKKINLHTV

SEQ ID NO: 3061 - protein, 1358 aa, unidentified
  REGION 1..1358: note = Description of Unknown: uncultivated organism sequence
  REGION 1..1358: note = Category: MG91 effectors
  REGION 1..1358: note = Description: MG91-253 effector
MEKEYYLGLDMGTNSVGWAVTDDAYNLIRFKGKDMWGIREFDEANPAVERRTHRTSRRREQRNAVRMGLIRSYFADEIQKVDSNFYQRLDNSFFHVEDKQDNVKDKNGIFNDKNYKDADYYKQYPTIFHLRKELIEDASQKDVRLVYLAVANMFKHRGHFLLSGIGSESSKQTITDLYNQVSGLITEEYGISLKTDIAGTDFEQVLCSREYSRTRKSEKVCEILEIKNSDKLKKAFVKSMCGLSVKITDVIDDTFTEISDEDKKITFSFVDSDYDEKAGVLEEKLGTDVYDIISKLKEIHDKAQVAEIMKNYQYLSFARVADYEKHKKDLKILKRVVKKYFEPTVYDKLFRSGENGTYSAYVNSFNSGEKSRRNYKERKQEDLYNSIKKLLKSIDNVCDTDIEYIKNEIEKENFLPKQLTFKNGVIPNQIHVSELKAILKNAEKYLPFLNEKDESGYTVSERILMLFSFQIPYYVGPVSPNSNGWVKRLEPGQVLPWNIDKKIDLKETSEQFIQRMVRNCTYIAGEKVLPKASLLYENFKVLNEINNLSINGERIAVALKQDLYNTLFLKGKRVTRKQIFNYFHSRGLVEEDSQISGIDIAVNNSLSTYGKFLPLFGEHLKEDKYKKMVDDIVFWCTVYGDSRKFLREQLEEKYSDVLDENQIKRITGMKFKDWGNLSKEFLELLGCCKSTGEMIPLIRAMWETNYNLMELLHSEEFTYSEELEEKQGKIEKVLSEYTIDDLNEEYFSAPVKRMVWQTLLIIKEIEKIMKCPPTRIFVEMTRKDDEKGDNGRKSSRKDQLLALYKKIQSEDKEWKKEMSLRIEDYDKNGALRSKKLYLYFIQKGLDMYTGKPIDLDNLMSANSNYDIDHIYPRHFVKDDNINNNLVLASKPANAEKSDIYPIKDSIYQKMKYTWKVLRDEGLITEEKYKRLTGRNPFTDEQKAGFIARQLVETGQGTKGVADLLTALLPDTKLVYSKAGNVSDFRKRYDIPKSRLINDFHHAHDAYLNIVVGNIYFTKFTSNPLNYIRKECSSKDNKYQYNLGNMYKWDVKRDGKTAWIAAKEGETGTIATVKKILSRNTPTLTRLTIEGHGGIADATLYSHKKAKQDAYIPLKSSDARMADVTKYGGYSSVTTAYLFLVEHEIKGKKIRTLETVPLYLKDRLENSKEKLEEYCRESLGYTNPSVRMKKIKLQSLIKLNGYYMQISGKSIKQFEVRNYVQICLNGKWVDYIHKLEKYQDKGVIDNAITDEKNVELYNILCEKHSVGIFTLRPNPVGDKIKKGYDKFVNLTTEEQIKLLIEIIKLTCVGIVKADLRLIGASEKSGTMKINKNITDAKECFLINQSVTGLYENRIDLLRV

SEQ ID NO: 3062 - protein, 1358 aa, unidentified
  REGION 1..1358: note = Description of Unknown: uncultivated organism sequence
  REGION 1..1358: note = Category: MG91 effectors
  REGION 1..1358: note = Description: MG91-254 effector
MEKEYYLGLDMGTNSVGWAVTDDAYNLIRFKGKDMWGIREFDEANPAVERRTHRTSRRRKQRNAVRMGLIRSYFADEIQKVDSNFYQRLDNSFFHVEDKQDNVKDKNGIFNDKNYKDADYYKQYPTIFHLRKELIEDASQKDVRLVYLAVANMFKHRGHFLLSGIGSESSKQTITDLYNQVSGLITEEYGISLKTDIAGTDFEQVLCSREYSRTRKSEKVCEILEIKNSDKLKKAFVKSMCGLSVKITDIIDDTFTEISDEDKKITFSFVDSDYDEKAGVLEEKLGTDVYDIISKLKEIHDKAQVAEIMKNYQYLSFARVADYEKHKKDLKILKRVVKKYFEPTVYDKLFRSEENGTYSAYVNSFNSEEKSRRNYKERKQEDLYNSIKKLLKSVDNVDDTDIEYIKNEMDKENFLPKQLTFKNGVIPNQIHASELKAILKNAEKYLPFLNEKDESGYTVSERILMLFSFQIPYYVGPVSSNSNGWVKRLEPGQVLPWNIDKKIDLKETSEQFIQRMVRNCTYIAGEKVLPKASLLYENFKVLNEINNLSINGERITVNLKQDLYNTLFLKGKRVTRKQIFNYFHSRGLVEEDSQISGIDIAVNNSLSTYGKFLPLFGEHLKEDKYKKMVDDIVFWCTVYGDSRKFLREQLEEKYSDVLDENQIKRITGMKFKDWGNLSKEFLELSGCCKSTGEVMPLIRAMWETNYNLMELLHSEEFTYSEELEEKQGKIEKVLSEYTIDDLNEEYFSAPVKRMVWQTLLIIKEIEKIMKCPPTRIFVEMTRKDDEKGDNGRKSSRKDQLLALYKKIQSEDKEWKKEMSSRIEDYDKNGALRSKKLYLYFIQKGLDMYTGKPIDLDNLMSANSNYDIDHIYPRHFVKDDNINNNLVLASKPANAEKSDIYPIKDSIYQKMKYTWKVLRDEGLITEEKYKRLTGRNPFTDEQKAGFIARQLVETGQGTKGVADLLTALLPDTKLVYSKAGNVSDFRKRYDIPKSRLINDFHHAHDAYLNIVVGNIYFTKFTSNPLNYIRKECSSKDNKYQYNLGNMYKWDVKRDGKTAWVAPEEGETGTLATVKKMLSRNTPILTRLTIEGHGGIADATLYSHKKAKQDTYIPLKSSDARMADVTKYGGYSSVTTAYLFLVEHEIKGKKIRTLETVPIYLKDRLENSKEKLEEYCRETLGYTNPSVRMKKIKLQSLIKLNGYYMQISGRTGNRFTLRNYVQLCLNGKWVDYIHKLEKYQDKGVIDDLITDERNVELYNVLCEKHSVGIFTLRPNLVGDKIKNGYDKFVNLTTEEQIKLLIEIIKLTCVGIVSANLTLIGGAAISGKMLMSKNITYANECILINQSVTGLYENRIDLLRV

SEQ ID NO: 3063 - protein, 1352 aa, unidentified
  REGION 1..1352: note = Description of Unknown: uncultivated organism sequence
  REGION 1..1352: note = Category: MG91 effectors
  REGION 1..1352: note = Description: MG91-255 effector
MTAFKYYLGLDMGTNSVGWAATDPEYRLLKAKGKDLWGIREFNEASGAVERRTHRISRRRRQREQVRIGILKDYFHDAICEVDPGFFQRLENSKYHEEDKDVEVRYKNNIFNDSNYTDKDYFNEYPTIYHLRNELISSTEKHDVRLVFLALLNMFKHRGHFLNAGLGENNGESNIDNAYFELTELLSELTEYHLSQDIDCKQIEAILSRRDMSRTHKAEELAGVLHVDLKNKPYKELIRGLCGLKFNACVVFPDVQSEEVTKLDICLSESTFDEKSDEIANIIGEDYFEIIMAMKEMFDIGSLASIMKGHNYLSQARVASYTKHKEDLKLLKEVIKKYCGKKEYDKFFNSDADGSYASYVGSYNSKNKERRVGNKRTSEELYKEIKKLLKDAQKEDENVQKILTSIENETFLPKQLTASNGVIPNQVHAREMKKILSNAENYLPFLTEKDETGLSVSERILKLFTFQIPYYVGPTSENSGKNGGNGWVVRREDGQVLPWNIDEKIDMKATSEAFISRMVRRCTYISGEQVLPKASLEYQSYCVLNEINNIKIDGERISVELKQDIYKAVFQKGKKVTKKQLCKYLHTRGIIETEEQVTGVDVSINNALTTYGKFKPIFGEDISKDSVQKMIEDIVFWCTVYGDSKKFLKDRIEEKYGNKLSEEQIKRILGFKFKDWGNLSKKFLELNGADTSTGESISIIRALWNNNLNLMELINSSLYNYKECLAEYQNTMLKTLSEIEAEDLNEYYFSAPVRRMIWQTILVIKELVKVLGCEPERIFVEMTRKPDEHKTRTSSRRNKFEELYKKVKDETTDWMQVIANAEEDGKIRSKKMYLYLTQKGRCMYTGKHIELDDLFDNNLYDIDHIYPRHFVKDDNIDNNLVLVCKEKNAHKSDHYPIEEEIFLSQKKMWLELRKSGFITEEKYNRLMDRNPFSDEQKAGFIARQLVETSQGTKGVANILRQLLPGSKIVYAKASNVSEFRCTRDDIQKSRLVNDFHHAHDAYLNIVVGNVYYVKFTQNPLNFIKKDYDKYKEDYNLSKMFDWDVKRNGEVAWIAQRKDGAAGTITTVKRMLSRNTPLMTRYSFDGKGGLTNETLYSAKKAKGEGYIPFKSSDDKMQDVTKYGGFTSVTGAYFFLVEHTEKKKRIRTIESVPVYLAQKIEQNPDELKKYCEEILGLIDADIRLKKIKIGSLIKRNGYFCYITGKTVNRLIVRNAVNLCLKNEWIKYISKLEKVKEKDAVDKIITKEKNEVLYSELIQKFKHGIFSKRPNPVGDKLEKDSEKFNNLSIKDQCAVLCQVLRMAAILGSECDMTLLGDSPNCGKMLISKKIGDEEIYLINQSVTGLYEKKINLHTV

SEQ ID NO: 3064 - protein, 1358 aa, unidentified
  REGION 1..1358: note = Description of Unknown: uncultivated organism sequence
  REGION 1..1358: note = Category: MG91 effectors
  REGION 1..1358: note = Description: MG91-256 effector
MEKEYYLGLDMGTNSVGWAVTDDAYNLIRFKGKDMWGIREFDEANPAVERRTHRTSRRREQRNAVRMGLIRSYFADEIQKVDSNFYQRLDNSFFHVEDKQDNVKDKNGIFNDKNYKDADYYKQYPTIFHLRKELIEDASQKDVRLVYLAVANMFKHRGHFLLSGIGSESSKQTITDLYNQVSGLITEEYGISLKTDIAGTDFEQVLCSREYSRTRKSEKVCEILEIKNSDKLKKAFVKSMCGLSVKITDIIDDTFTEISDEDKKITFSFVDSDYDEKAGVLEEKLGTDVYDIISKLKEIHDKAQVAEIMKNYQYLSFARVADYEKHKKDLKILKRVVKKHFEPTVYDKLFRSEENGTYSAYVNSFNSEEKSRRNYKERKHEDLYNSIKKLLKSVDNVDDTDIEYIKNEMDKENFLPKQLTFKNGVIPNQIHASELKAILKNAEKYLPFLNEKDESGYTVSERILMLFSFQIPYYVGPVSSNSNGWVKRLESGQVLPWNIDKKIDLKETSEQFIQRMVRNCTYIAGEKVLPKASLLYENFKVLNEINNLSINGERITVNLKQDLYNTLFLKGKRVTRKQIFNYFHSRGLVEEDSQISGIDIAVNNSLSTYGKFLPLFGEHLKEDKYKKMVDDIVFWCTVYGDSRKFLREQLEEKYSDVLDENQIKRITGMKFKDWGNLSKEFLELSGCCKSTGEVMPLIRAMWETNYNLMELLHSEEFTYSEELEEKQGKIEKVLSEYTIDDLNEEYFSAPVKRMVWQTLLIIKEIEKIMKCPPTRIFVEMTRKDDEKGDNGRKSSRKDQLLALYKKIQSEDKEWKKEMSSRIEDYDKNGALRSKKLYLYFIQKGLDMYTGKPIDLDNLMSANSNYDIDHIYPRHFVKDDNINNNLVLASKPANAEKSDIYPIKDSIYQKMKYTWKVLRDEGLITEEKYKRLTGRNPFTDEQKAGFIARQLVETGQGTKGVADLLTALLPDTKLVYSKAGNVSDFRKRYDIPKSRLINDFHHAHDAYLNIVVGNIYFTKFTSNPLNYIRKECSSKDNKYQYNLGNMYKWDVKRDGKTAWIAAKEGETGTIATVKKILSRNTPTLTRLTIEGHGGIADATLYSHKKAKQDAYIPLKSSDARMADVTKYGGYSSVTTAYLFLVEHEIKGKKIRTLETVPLYLKDRLENSKEKLEEYCRETLGYTNPSVRMKKIKLQSLIKLNGYYMQISGRTGNRFTLRNYVQLCLNGKWVDYIHKLEKYQDKGFIDNVITDEKNVELYNVLCEKHSVGIFTLRPNPVGDKIKKGYDKFVNLTTEEQIKLLIEIIKLTCVGIVSANLTLIGGASISGKMLISKNITDAKECLLINQSVTGLYENRIDLLRV

SEQ ID NO: 3065 - protein, 1358 aa, unidentified
  REGION 1..1358: note = Description of Unknown: uncultivated organism sequence
  REGION 1..1358: note = Category: MG91 effectors
  REGION 1..1358: note = Description: MG91-257 effector
MRETGKDYYLGLDMGTNSVGWAVTDENYVLMRAKGKDLWGIREFDEALTAVDRRTHRVARRRRQREIARIGLLKEYFHDAIAEVDPDFYQRLDNSKYHEEDKDSAVKGKNGIFNDANYNDKDYFKQYPTIFHLRKELIESTEKHDVRLVYLALLNMFKHRGHFLNAGLSTESENTMDTAYHNFVETAAQTIECNFMETVDIEKIKEILGSRDYSRSKKAELVAQILHVDSKNKVQMACIKCICGLKVTAAAIFGDKMAADEEKKTDICFSDFGYDEKVPVILEIVGEENFELVLAMQEIYDIGSLAGIMKDSLYLSMARVKEYEQHGKDLRILKGVVKKYGTKEEYDTLFRTMEEGTYSAYVNSVNTKKKSRRDVKKRTRDEFYGRLKKIISKMPQNDSDVLYIKDKMEKEAFLPKQLTASNGVIPNQIHAREMKKILQNAEIYLPFLKEKDTSGLTVSERILKLFSFQIPYYVGPVSEKSKLNGGNGWVVRKEEGTVLPWNIEEKIDMTATSREFVERMVRRCSYLSDERVLPKGSLLYERFCVLNEINAIKVDGVKIPVEIKQDLYSKYFKKGKKVTKKKIAEFLIARGVIKEDQTELISGIDIAVNSTLSTYAKFYAIFGEKMEQDSYKKMVEQIVEWCTIYGDAKKFLEQKIKECYGNVLTQEEIKRITGFKFRDWGRLSKEFLELSGCSKATGEVMPLISMMWETNDNLMELLDDNYYTYREALEEKQNNAFKLLADIEPEDLDEMYFSAPVKRMVWQTLCIIKELEKVLGKAPKRLFVEMTRNEQKDKKRTDSRKQQFLDLYKNIKDESRDWKELITRADENGTLKSKKMYLYLTQMGRCMYTGHPIDLEDLFKDNRYDIDHIYPRHFVKDDNIMNNLVLVEKEKNAHKSDNYPLEEEIYKKQLPMWKDLHQRKLITDEKFKRLTGRNEFTDEQKAGFIARQLVETSQGTKGVTTILERALPDTKIVYAKASNVSEFRQKRDLLKSRVVNDFHHAQDAYLNIVVGNVYFVKFTQNPLHFIKAEYDKNKAQYEYNLSRMFDRDVRRGNETAWIGCKKGEEAGTILTVKKMMAKNTPMLTRLSFEGKGGLADQTLYSAEKAKGNGYIPLKTSDSKMQDVTKYGGFNSVSTAYFFLVEHELKGKKVRTLETVPIIWRDRIEKDETMLLKYCTDVLELKNPSIRVKKIKLQSYIKKDGYYMYITGKTLNRIIIKNAVQMCLQQKWIVYIKNIEKAIQKKTIDATITYDANLELYNLIERKYKYEIFKNRPNPMGDKIEQGKKLFEEKSLLEQSKILYELLQLSAIGNVKADLQLIGGSASSGVMLIPKNITDSKEFILINQSVTGLFEQKVDLLTV

SEQ ID NO: 3066 - protein, 1358 aa, unidentified
  REGION 1..1358: note = Description of Unknown: uncultivated organism sequence
  REGION 1..1358: note = Category: MG91 effectors
  REGION 1..1358: note = Description: MG91-258 effector
MEKEYYLGLDMGTNSVGWAVTDDAYNLIRFKGKDMWGIREFDEANPAVERRTHRTSRRREQRNAVRMGLIRSYFADEIQKVDSNFYQRLDNSFFHVEDKQDNVKDKNGIFNDKNYKDADYYKQYPTIFHLRKELIEDASQKDVRLVYLAVANMFKHRGHFLLSGIGSESSKQTITDLYNQVSGLITEEYGISLKTDIAGTDFEQVLCSREYSRTRKSEKVCEILEIKNSDKLKKAFVKSMCGLSVKITDVIDDTFTEISDEDKKITFSFVDSDYDEKAGVLEEKLGTDVYDIISKLKEIHDKAQVAEIMKNYQYLSFARVADYEKHKKDLKILKRVVKKYFEPTVYDKLFRSGENGTYSAYVNSFNSGEKSRRNYKERKQEDLYNSIKKLLKSIDNVCDTDIEYIKNEIEKENFLPKQLTFKNGVIPNQIHVSELKAILKNAEKYLPFLNEKDESGYTVSERILMLFSFQIPYYVGPVSPNSNGWVKRLEPGQVLPWNIDKKIDLKETSEQFIQRMVRNCTYIAGEKVLPKASLLYENFKVLNEINNLSINGERITVNLKQDLYNTLFLKGKRVTRKQIFNYFHSRGLVEEDSQISGIDIAVNNSLSTYGKFLPLFGEHLKEDKYKKMVDDIVFWCTVYGDSRKFLREQLEEKYSDVLDENQIKRITGMKFKDWGNLSKEFLELSGCCKSTGEVMPLIRAMWETNYNLMELLHSEEFTYSEELEEKQGKIEKVLSEYTIDDLNEEYFSAPVKRMVWQTLLIIKEIEKIMKCPPTRIFVEMTRKDDEKGDNGRKSSRKDQLLALYKKIQSEDKEWKKEMSSRIEDYDKKGALRSKKLYLYFIQKGLDMYTGKPIDLDNLMSANSNYDIDHIYPRHFVKDDNINNNLVLASKPANAEKSDIYPIKDSIYQKMKYTWKVLRDEGLITEEKYKRLTGRNPFTDEQKAGFIARQLVETGQGTKGVADLLTALLPDTKLVYSKAGNVSDFRKKYDIPKSRLINDFHHAHDAYLNIVVGNIYFTKFTSNPLNYIRKECSSKDNKYQYNLGNMYKWDVKRDGKTAWIAAKEGETGTIATVKKMLSRNTPTLTRLTIEGHGGIADATLYSHKKAKQDAYIPLKSSDARMADVTKYGGYSSVTTAYLFLVEHEIKGKKIRTLETVPLYLKDRLENSKEKLEEYCRETLGYTNPSVRMKKIKLQSLIKLNGYYMQISGKTNKQFTVRNYVQFCLNSKWVDYIHKLEKYQDKGVIDDAITDEKNVELYNVLCEKHSVGIFTLRPNPVGDKIKKGYDKFVNLTTEEQIKLLIEIIKLTCVGIVSANLTLIGGASISGKMLISKNITDAKECLLINQSVTGLYENRIDLLRV

SEQ ID NO: 3067 - protein, 1358 aa, unidentified
  REGION 1..1358: note = Description of Unknown: uncultivated organism sequence
  REGION 1..1358: note = Category: MG91 effectors
  REGION 1..1358: note = Description: MG91-259 effector
MEKEYYLGLDMGTNSVGWAVTDDAYNLIRFKGKDMWGIREFDEANPAVERRTHRTLRRREQRNAVRMGLIRSYFADEIQKVDSNFYQRLDNSFFHVEDKRDNVKDKNGIFNDKNYKDADYYKQYPTIFHLRKELIEDASQKDVRLVYLAVANMFKHRGHFLLSGIGSESSKQTITDLYNQVSGLITEEYGISLKTDIAGTDFEQVLCSREYSRTRKSEKVCEILEIKNSDKLKKAFVKSMCGLSVKITDIIDDTFTEISDEDKKITFSFVDSDYDEKAGVLEEKLGTDVYDIISKLKEIHDKAQVAEIMKNYQYLSFARVADYEKHKKDLKILKRVVKKHFEPTVYDKLFRSEENGTYSAYVNSFNSGEKSRRNYKERKQEDLYNSIKKLLKSVDNVDDTDIEYIKNEMDKENFLPKQLTFKNGVIPNQIHASELKAILKNAEKYLLFLNEKDESGYTVSERILMLFSFQIPYYVGPVSSNSNGWVMRLESGQVLPWNIDKKIDLKETSEQFIQRMVRNCTYIAGEKVLPKASLLYENFKVLNEINNLSINGERITVNLKQDLYNTLFLKGKRVTRKQIFNYFHSRGLVEEDSQISGIDIAVNNSLSTYGKFLPLFGEHLKEDKYKKMVDDIVFWCTVYGDSRKFLREQLEEKYSDVLDENQIKRITGMKFKDWGNLSKEFLELSGGCKSTGEMIPLIRAMWETNYNLMELLHSEEFTYSEELEEKQGKIEKVLSEYTIDDLNEEYFSAPVKRMVWQTLLIIKEIEKIMKCPPTRIFVEMTRKDDEKGDNGRKSSRKDQLLALYKKIQSEDKEWKKEMSSRIEDYDKNGALRSKKLYLYFIQKGLDMYTGKPIDLDNLMSANSNYDIDHIYPRHFVKDDNINNNLVLASKPANAEKSDIYPIKDSIYQKMKYTWKVLRDEGLITEEKYKRLTGRNPFTDEQKAGFIARQLVETGQGTKGVADLLTALLPDTKLVYSKAGNVSDFRKMYDIPKSRLINDFHHAHDAYLNIVVGNIYFTKFTSNPLNYIRKECSSKDNKYQYNLGNMYKWDVKRDGKTAWIAAKEGETGTIATVKKMLSRNTPTLTRLTIEGHGGIADATLYSHKKAKQDAYIPLKSSDARMADVTKYGGYSSVTTAYLFLVEHEIKGKKIRTLETVPLYLKDRLENSKEKLEEYCRETLGYTNPSVRMKKIKLQSLIKLNGYYMQISGKSIKQFEVRNYVQICLNGKWVDYIHKLENYQDKGVIDNAITDEKNVELYNILCEKHSVGIFTLRPNPVGDKIKKGYDKFVNLTTEEQIKLLIEIIKLTCVGIVKADLRLIGASEKSGTMKINKNITDAKECFLINQSVTGLYENRIDLLRV

SEQ ID NO: 3068 - protein, 1352 aa, unidentified
  REGION 1..1352: note = Description of Unknown: uncultivated organism sequence
  REGION 1..1352: note = Category: MG91 effectors
  REGION 1..1352: note = Description: MG91-260 effector
MTAFKYYLGLDMGTNSVGWAATDPEYRLLKAKGKDLWGIREFNEASGAVERRTHRISRRRRQREQVRIGILKDYFHDAICEVDPSFFRRLENSKYHEEDKDVEVRYKNNIFNDGNYTDKDYFNEYPTIYHLRNELISSTEKHDVRLVFLALLNMFKHRGHFLNAGLGENNGESNIDNAYFELTELLSELTEYHLSQDIDCKQIEAILSRRDMSRTHKAEELAGVLHVDLKNKPYKELIRGLCGLKFNACVVFPDVQSEEVTKLDICLSESSFDEKSDEIANIIGEDYFEIIMAMKEMFDIGSLASIMKGHNYLSQARVASYTKHKEDLKLLKEVIKKYCGKKEYDKFFNSDADGSYASYVGSYNSKNKERRVGNKRTSEELYKEIKKLLKDAPKEDENVQKILTSIENETFLPKQLTASNGVIPNQVHAREMKKILSNAENYLPFLTEKDETGLSVSERILKLFTFQIPYYVGPTSENSGKNGGNGWVVRREDGQVLPWNIDEKIDMKATSEAFISRMVRRCTYISGEQVLPKASLEYQSYCVLNEINNIKIDGERISVELKQDIYKAVFQKGKKVTKKQLCKYLHTRGIIETEEQVTGVDVSINNALTTYGKFKPIFGEDISKDSVQKMIEDIVFWCTVYGDSKKFLKDRIEEKYGNKLSEEQIKRILGFKFKDWGNLSKKFLELNGADTSTGESISIIRALWNNNLNLMELINSSLYNYKECLAEYQNTMLKTLSEIEAEDLNEYYFSAPVRRIIWQTILVIKELVKVLGCEPERIFVEMTRKPDEHKTRTSSRRNKFEELYKKVKDEATDWMQVIAKAEEDGKIRSKKMYLYLTQKGRCMYTGKHIELDDLFDKNLYDIDHIYPRHFVKDDNIDNNLVLVCKEKNAHKSDHYPIEEEIFLSQKKMWLELRKSGFITEEKYNRLMGRSPFSDEQKAGFIARQLVETSQGTKGVANILRQLLPGSKIVYAKASNVSEFRHTRDDIPKSRLVNDFHHAHDAYLNIVVGNVYYVKFTQNPLNFIKKDYDKYKEDYNLSKMFDWDVKRNGEVAWIAQRKDGEAGTITTVKRMLSRNTPLMTRYSFEGKGGLANETLCSAKKAKGEGYIPFKSSDDKMQDVTKYGGFTKVTGAYFFLVEHTEKKKRIRTIESVPVYLAQKIEQNPDELKKYCEEILGLVDADIRLKKIKIGSLIKRNGYFCYITGKTGNQLSVRNAVNLCLKNEWIKYISKLEKVKEKDAVDEIITKEKNEVLYSELIQKFKHGIFSKRPNPVEDKLEKGSEKFSNLSIKEQCAVLCQILQLAAVLGSECDMTLLGESAHCGKMLISKKIGDEEIYLLNQSVTGLYEKKINLHTV

SEQ ID NO: 3069 - protein, 1352 aa, unidentified
  REGION 1..1352: note = Description of Unknown: uncultivated organism sequence
  REGION 1..1352: note = Category: MG91 effectors
  REGION 1..1352: note = Description: MG91-261 effector
MTAFKYYLGLDMGTNSVGWAATDPGYRLLKAKGKDLWGIREFNEASGAVERRTHRISRRRRQREQVRIGILKDYFHDAICEVDPSFFQRLENSKYHEEDKDVEVRYKNNIFNDSNYTDKDYFNEYPTIYHLRNELISSTEKHDVRLVFLALLNMFKHRGHFLNAGLGENNGESNIDNAYFELTELLSELTEYHLSQDIDCKQIEAILSRRDMSRTHKAEELAGVLHVDLKNKPYKELIRGLCGLKFNACVVFPDVQSEEVTKLDICLSESTFDEKSDEIANIIGEDYFEIIMAMKEMFDIGSLASIMKGHNYLSQARVASYTKHKEDLKLLKEVIKKYCGKKEYDKFFNSDADGSYASYVGSYNSKNKERRVGNKRTSEELYKEIKKLLKDAQKEDENVQKILTSIENETFLPKQLTASNGVIPNQVHAREMKKILSNAENYLPFLTEKDETGLSVSERILKLFTFQIPYYVGPTSENSGKNGGNGWVVRREDGQVLPWNIDEKIDMKATSEAFISRMVRRCTYISGEQVLPKASLEYQSYCVLNEINNIKIDGERISVELKQDIYKAVFQKGKKVTKKQLCKYLHTRGIIETEEQVTGVDVSINNALTTYGKFKPIFGEDISKDSVQKMIEDIVFWCTVYGDSKKFLKDRIEEKYGNKLSEEQIKRILGFKFKDWGNLSKKFLELNGADTSTGESISIIRALWNNNLNLMELINSSLYNYKECLAEYQNTMLKTLSEIEAEDLNEYYFSAPVRRMIWQTILVIKELVKVLGCEPERIFVEMTRRPDEHKTRTSSRRNKFEELYKKVKDETTDWMQVIANAEEDGKIRSKKMYLYLTQKGRCMYTGKHIELDDLFDNNLYDIDHIYPRHFVKDDNIDNNLVLVCKEKNAHKSDHYPIEEEIFLSQKKMWLELRKSGFITEEKYNRLMGRSPFSDEKKAGFIARQLVETSQGTKGVANILRQLLPGSKIVYAKASNVSEFRHTRDDIPKSRLVNDFHHAHDAYLNIVVGNVYYVKFTQNPLNFIKKDYDKYKEDYNLSKMFDWDVKRNGEVAWIAQRKDGEAGTITTVKKMLSRNTPLMTRYSFEGKGGLANETLYSAKKAKGEGYIPFKSSDDKMQDVTKYGGFTKVTGAYFFLVEHTEKKKRIRTIESVPVYLAQKIEQNPDELKKYCEEILGLVDADIRLKKIKIGSLIKRNGYFCYITGKTGNRLSVRNAVNLCLKNEWIKYISKLEKVKEKDTVDEIITKEKNEVLYSELIQKFKHGIFSKRPNPVEDKLEKGSEKFSNLSIKEQCAVLCQILQLAAVLGSECDMTLLGESAHCGKMLISKKIGDEEIYLLNQSVTGLYEKKINLHTV

SEQ ID NO: 3070 - protein, 1358 aa, unidentified
  REGION 1..1358: note = Description of Unknown: uncultivated organism sequence
  REGION 1..1358: note = Category: MG91 effectors
  REGION 1..1358: note = Description: MG91-262 effector
MEKEYYLGLDMGTNSVGWAVTDDAYNLIRFKGKDMWGIREFDEANPAVERRTHRTSRRREQRNAVRMGLIRSYFADEIQKVDSNFYQRLDNSFFHVEDKQDNVKDKNGIFNDKNYKDADYYKQYPTIFHLRKELIEDASQKDVRLVYLAVANMFKHRGHFLLSGIGSESSKQTITDLYNQVSGLITEEYGISLKTDIAGTDFEQVLCSREYSRTRKSEKVCEILEIKNSDKLKKAFVKSMCGLSVKITDVIDDTFTEISDEDKKITFSFVDSDYDEKAGVLEEKLGTDVYDIISKLKEIHDKAQVAEIMKNYQYLSFARVADYEKHKKDLKILKRVVKKYFEPTVYDKLFRSGENGTYSAYVNSFNSGEKSRRNYKERKQEDLYNSIKKLLKSIDNVCDTDIEYIKNEIEKENFLPKQLTFKNGVIPNQIHVSELKAILKNAEKYLPFLNEKDESGYTVSERILMLFSFQIPYYVGPVSPNSNGWVKRLEPGQVLPWNIDKKIDLKETSEQFIQRMVRNCTYIAGEKVLPKASLLYENFKVLNEINNLSINGERIAVALKQDLYNTLFLKGKKVTRKQIFNYFHSRGLVEEDSQISGIDIAVNNSLSTYGKFLPLFGEHLKEDKYKKMVDDIVFWCTVYGDSRKFLREQLEEKYSDVLDENQIKRITGMKFKDWGNLSKEFLELSGCCKSTGEMIPLIRAMWETNYNLMELLHSEEFTYSEELEEKQGKIEKVLSEYTIDDLNEEYFSAPVKRMVWQTLLIIKEIEKIMKCPPTRIFVEMTRKDDEKGDNGRKSSRKDQLLALYKKIQSEDKEWKKEMSSRIEDYDKNGALRSKKLYLYFIQKGLDMYTGKPIDLDNLMSANSNYDIDHIYPRHFVKDDNINNNLVLASKPANAEKSDIYPIKDSIYQRMKYTWKVLRDEGLITEEKYKRLTGRNPFTDEQKAGFIARQLVETGQGTKGVADLLTALLPDTKLVYSKAGNVSDFRKRYDIPKSRLINDFHHAHDAYLNIVVGNIYFTKFTSNPLNYIRKECSSKDNKYQYNLGNMYKWDVKRDGKTAWIAAKEGETGTIATVKKMLSRNTPTLTRLTIEGHGGIADATLYSHKKAKQDAYIPLKSSDARMADVTKYGGYSSVTTAYLFLVEHEIKGKKIRTLETVPLYLKDRLENSKEKLEEYCRESLGYTNPSVRMKKIKLQSLIKLNGYYMQISGKSIKQFEVRNYVQICLNGKWVDYIHKLEKYQDKGVIDNAITDEKNVELYNILCEKHSVGIFTLRPNPVGDKIKKGYDKFVNLTTEEQIKLLIEIIKLTCVGIVKADLRLIGASEKSGTMKINKNITDAKECFLINQSVTGLYENRIDLLRV

SEQ ID NO: 3071 - protein, 1175 aa, unidentified
  REGION 1..1175: note = Description of Unknown: uncultivated organism sequence
  REGION 1..1175: note = Category: MG91 effectors
  REGION 1..1175: note = Description: MG91-263 effector
MEKEYYLGLDMGTNSVGWAVTDDAYNLIRFKGKDMWGIREFDEANPAVERRTHRTSRRREQRNAVRMGLIRSYFADEIQKVDSNFYQRLDNSFFHVEDKQDNVKDKNGIFNDKNYKDADYYKQYPTIFHLRKELIEDASQKDVRLVYLAVANMFKHRGHFLLSGIGSESSKQTITDLYNQVSGLITEEYGISLKTDIAVTDFEQVLCSREYSRTRKSEKVCEILEIKNSDKLKKAFVKSMCGLSVKITDIIDDTFTEISDEDKKITFSFVDSDYDEKAGVLEEKLGTDVYDIISKLKEIHDKAQVAEIMKNYQYLSFARVADYEKHKKDLKILKRVVKKYFEPTIYDKLFRSEENGTYSAYVNSFNSEEKSRRNYKERKQEDLYNSIKKLLKSVDNVYDTDIEYIKNEMDKENFLPKQLTFKNGVIPNQIHASELKAILKNAEKYLPFLNEKDESGYTVSERILMLFSFQIPYYVGPVSPNSNGWVKRLEPGQVLPWNIDKKIDLKETSEQFIQRMVRNCTYIAGEKVLPKASLLYENFKVLNEINNLSISGERIAVALKQDLYNTLFLKGKRVTRKQIFNYFHSRGLVEEDSQISGIDIAVNNSLSTYGKFLPLFGDHLKEDKYKKMVDDIVFWCTVYGDSRKFLREQLEEKYSDVLDENQIKRITGMKFKDWGNLSKEFLELSGCCKSTGEVMPLIRAMWETNYNLMELLHSEEFTYSEELEEKQGKIEKVLSEYTIDNLNEEYFSAPVKRMVWQTLLIIKEIEKIMKCPPTRIFVEMTRKDDEKGDNGRKSSRKDQLLALYKKIQSEDKEWKKEMSSRIEDYDKNGALRSKKLYLYFIQKGLDMYTGKPIDLDNLMSVNSNYDIDHIYPRHFVKDDNINNNLVLASKPANAEKSDIYPIKDSIYQKMKYTWKVLRDEGLITEEKYKRLTGRNPFTDEQKAGFIARQLVETGQGTKGVADLLTALLPDTKLVYSKAGNVSDFRKKYDIPKSRLINDFHHAHDAYLNIVVGNIYFTKFTSNPLNYIRKECSSKDNKYQYNLGNMYKWDVKRDGKTAWIAAKEGETGTIATVKKMLSRNTPTLTRLTIEGHGGIADATLYSHKKAKQDTYIPLKSSDARMADVTKYGGYSSVTTAYLFLVEHEIKGKKIRTLETVPIYLKDRLENSKEKLEEYCR

SEQ ID NO: 3072 - protein, 1352 aa, unidentified
  REGION 1..1352: note = Description of Unknown: uncultivated organism sequence
  REGION 1..1352: note = Category: MG91 effectors
  REGION 1..1352: note = Description: MG91-264 effector
MTAFKYYLGLDMGTNSVGWAATDPEYRLLKAKGKDLWGIREFNEASGAVERRTHRISRRRRQREQVRIGILKDYFHDAICEVDPGFFQRLENSKYHEEDKDVEVRYKNNIFNDSNYTDKDYFNEYPTIYHLRNELISSTEKHDVRLVFLALLNMFKHRGHFLNAGLGENNGESNIDNAYFELTELLSELTEYHLSQDIDCKQIEAILSRRDMSRTHKAEELAGVLHVDLKNKPYKELIRGLCGLKFNACVVFPDVQSEEVTKLDICLSESTFDEKSDEIANIIGEDYFEIIMAMKEMFDIGSLASIMKGHNYLSQARVASYTKHKEDLKLLKEVIKKYCGKKEYDKFFNSDADGSYASYVGSYNSKNKERRVGNKRTSEELYKEIKKLLKDAQKEDENVQKILTSIENETFLPKQLTASNGVIPNQVHAREMKKILSNAENYLPFLTEKDETGLSVSERILKLFTFQIPYYVGPTSENSGKNGGNGWVVRREDGQVLPWNIDEKIDMKATSEAFISRMVRRCTYISGEQVLPKASLEYQSYCVLNEINNIKIDGERISVELKQDIYKAVFQKGKKVTKKQLCKYLHTRGIIETEEQVTGVDVSINNALTTYGKFKPIFGEDISKDSVQKMIEDIVFWCTVYGDSKKFLKDRIEEKYGNKLSEEQIKRILGFKFKDWGNLSKKFLELNGADTSTGESISIIRALWNNNLNLMELINSSLYNYKECLAEYQNTMLKTLSEIEAEDLNEYYFSAPVRRMIWQTILVIKELVKVLGCEPERIFVEMTRKPDEHKTRTSSRRNKFEELYKKVKDETTDWMQVIANAEEDGKIRSKKMYLYLTQKGRCMYTGKHIELDDLFDNNLYDIDHIYPRHFVKDDNIDNNLVLVCKEKNAHKSDHYPIEEEIFLSQKKMWLELRKSGFITEEKYNRLMDRNPFSDEQKAGFIARQLVETSQGTKGVANILRQLLPGSKIVYTKASNVSEFRCTRDDIQKSRLVNDFHHAHDAYLNIVVGNVYYVKFTQNPLNFIKKDYDKYKEDYNLSKMFDWDVKRNGEVAWIAQRKDGAAGTITTVKRMLSRNTPLMTRYSFDGKGGLTNETLYSAKKAKGEGYIPFKSSDDKMQDVTKYGGFTSVTGAYFFLVEHTEKKKRIRTIESVPVYLAQKIEQNPDELKKYCEEILGLIDADIRLKKIKIGSLIKRNGYFCYITGKTVNRLIVRNAVNLCLKNEWIKYISKLEKVKEKDAVDKIITKEKNEVLYSELIQKFKHGIFSKRPNPVGDKLEKDSEKFNNLSIKDQCAVLCQVLRMAAILGSECDMTLLGDSPNCGKMLISKKIGDEEIYLINQSVTGLYEKKINLHTV

SEQ ID NO: 3073 - protein, 1352 aa, unidentified
  REGION 1..1352: note = Description of Unknown: uncultivated organism sequence
  REGION 1..1352: note = Category: MG91 effectors
  REGION 1..1352: note = Description: MG91-265 effector
MTAFKYYLGLDMGTNSVGWAATDPEYRLLKAKGKDLWGIREFNEASGAVERRTHRISRRRRQREQVRIGILKDYFHDAICEVDPSFFRRLENSKYHEEDKDVEVRYKNNIFNDGNYTDKDYFNEYPTIYHLRNELISSTEKHDVRLVFLALLNMFKHRGHFLNAGLGENNGESNIDNAYFELTELLSELTEYHLSQDIDCKQIEAILSRRDMSRTHKAEELAGVLHVDLKNKPYKELIRGLCGLKFNACVVFPDVQSEEVTKLDICLSESSFDEKSDEIANIIGEDYFEIIMAMKEMFDIGSLASIMKGHNYLSQARVASYTKHKEDLKLLKEVIKKYCGKKEYDKFFNSDADGSYASYVGSYNSKNKERRVGNKRTSEELYKEIKKLLKDAPKEDENVQKILTSIENETFLPKQLTASNGVIPNQVHAREMKKILSNAENYLPFLTEKDETGLSVSERILKLFTFQIPYYVGPTSENSGKNGGNGWVVRREDGQVLPWNIDEKIDMKATSEAFISRMVRRCTYISGEQVLPKASLEYQSYCVLNEINNIKIDGERISVELKQDIYKAVFQKGKKVTKKQLCKYLHTRGIIETEEQVTGVDVSINNALTTYGKFKPIFGEDISKDSVQKMIEDIVFWCTVYGDSKKFLKDRIEEKYGNKLSEEQIKRILGFKFKDWGNLSKKFLELNGADTSTGESISIIRALWNNNLNLMELINSSLYNYKECLAEYQNTMLKTLSEIEAEDLNEYYFSAPVRRMIWQTILVIKELVKVLGCEPERIFVEMTRKPDEHKTRTSSRRNKFEELYKKVKDETTDWMQVIANAEEDGKIRSKKMYLYLTQKGRCMYTGKHIELDDLFDNNLYDIDHIYPRHFVKDDNIDNNLVLVCKEKNAHKSDHYPIEEEIFLSQKKMWLELRKSGFITEEKYNRLMDRNPFSDEQKAGFIARQLVETSQGTKGVANILRQLLPGSKIVYAKASNVSEFRCTRDDIQKSRLVNDFHHAHDAYLNIVVGNVYYVKFTQNPLNFIKKDYDKYKEDYNLSKMFDWDVKRNGEVAWIAQRKDGAAGTITTVKRMLSRNTPLMTRYSFDGKGGLTNETLYSAKKAKGEGYIPFKSSDDKMQDVTKYGGFTSVTGAYFFLVEHTEKKKRIRTIESVPVYLAQKIEQNPDELKKYCEEILGLIDADIRLKKIKIGSLIKRNGYFCYITGKTVNRLIVRNAVNLCLKNEWIKYISKLEKVKEKDAVDKIITKEKNEVLYSELIQKFKHGIFSKRPNPVGDKLEKDSEKFNNLSIKDQCAVLCQVLRMAAILGSECDMTLLGDSPNCGKMLISKKIGDEEIYLINQSVTGLYEKKINLHTV

SEQ ID NO: 3074 - protein, 1364 aa, unidentified
  REGION 1..1364: note = Description of Unknown: uncultivated organism sequence
  REGION 1..1364: note = Category: MG91 effectors
  REGION 1..1364: note = Description: MG91-266 effector
MEKEYYLGLDMGTSSVGWAVTDKEYRLLRAKGKDMWGIREFEEAQTAVERRTHRLSKRRRARQLVRIGLLKDYFHDEIMKIDPNFYIRLENSKYYLEDKDVRLASSNGIFDDKNYTDKDYYEQYKTIFHLRSELIHNSQKHDVRLVYLALLNMFKHRGHFLFEGDAYVQGNIGDIYKEFIQLLKNEYYEDENVKLTDQIDYFKLKEILSNSEFSRTAKAEKINSLVHIDKKNKLENTYIRLLCGLEIELKILFPEIDEKIKICFAKGYDEKLVEITEILTDNQLQILENLKKIHDIAALDKIRKGKEYLSDARVAEYEKHREDLALLKKIYREYMTKQDYDRMFREGEDGSYSAYVNSYNTSKKQRRNMKHRKIDEFYGTIRKDLKLLLKQGIQDDNIERILEEIDGNNDNKFMPKQLSFANGVIPNSLHKAEMKAILRNAETYLPFLLETDESGLTVSERILQLFSFHIPYYIGPVSVNSEKNNGNGWVVRREDGEVLPWNIEQKIDYGETSKRFIEKMVRRCTYISGEQVLPKNSFIYEKYCVLNEINNIKIDGERITVELKQNIYNDLYLHGKRVTKKQLINYLNNRGMIEDENQVSGIDINLNNYLGSYGKFLPIFEEKLKEDNYIKIAEDIIYLASIYGDSKKMLKSQIKSKYGDILDDKQIKRILGLKFKDWGRISRRFLELEGLDKETGEITTIIKAMWDYNLNFMEIIHSDAFDFKDKIEELHANSIKPLAEIEVEDLDDMYFSAPVKRMIWQTFKVIKEIEKVMGCPPKKVFIEMTRINDKKSKGKRTNSRKEKFLSLYKNIHDELVDWKQLIISSDESGKLNSKKMYLYLTQQGICMYTGRRINLEELFDDNKYDIDHIYPRHFVKDDNLENNLVLVEKQSNSRKSDTYPIDKSIRNNSQVYKHWKSLREGNFISKEKYDRLTGKNEFTDEQKAGFIARQMVETSQGTKGVADIIKQALPQSRIIYSKASNVSEFRRKYDILKSRTVNEFHHAHDAYLNIVVGNVYDTKFTSNPLNFIKKQYNVDRKANNYNLDKMFVYDVKRGNEIAWIGWNPKKSEDSSEMSKRGTIVTVKKMLSKNTPLMTRMSFVGHGGIAEDNLSSHFVAKNKGYMPNGKESDVTKYGGYKKAKTAYFFVVEHGQTNNRIRTIETLPIYRRREVEKYEDGLIKYCEQSLSLLNPIIIYKKIKIQSLMKINGYYAYISGKSNEVYTFRNGVNMCLSQEWINYVKKLENYIEKDRQDRMITYEKNIELYEIILRKYSTTILNKRLSKMDKKLINAKDRFCILNVKEQSQVLINVFVLSRIGDNQTDLSKIGIGKQSGQITQNKKITGCKEFKLVNQSVTGLYENEIDLLTV

SEQ ID NO: 3075 - protein, 1352 aa, unidentified
  REGION 1..1352: note = Description of Unknown: uncultivated organism sequence
  REGION 1..1352: note = Category: MG91 effectors
  REGION 1..1352: note = Description: MG91-267 effector
MTAFKYYLGLDMGTNSVGWAATDPEYRLLKAKGKDLWGIREFNEASGAVERRTHRISRRRKQREQVRIGILKDYFHDAICEVDPSFFQRLENSKYHEEDKDVEVRYKNNIFNDSNYTDKDYFNEYPTIYHLRNELISSTEKHDVRLVFLALLNMFKHRGHFLNAGLGENNGESNIDNAYFELTELLSELTEYHLSQDIDCKQIEAILSRRDMSRTHKAEELAGVLHVDLKNKPYKELIRGLCGLKFNACVVFPDVQSEEVTKLDICLSESTFDEKSDEIANIIGEDYFEIIMAMKEMFDIGSLASIMKGHNYLSQARVASYTKHKEDLKLLKEVIKKYCGKKEYDKFFNSDADGSYASYVGSYNSKNKERRVGNKRTSEELYKEIKKLLKDAQKEDENVQKILTSIENETFLPKQLTASNGVIPNQVHAREMKKILSNAENYLPFLTEKDETGLSVSERILKLFTFQIPYYVGPTSENSGKNGGNGWVVRREDGQVLPWNIDEKIDMKATSEAFISRMVRRCTYISGEQVLPKASLEYQSYCVLNEINNIKIDGERISVELKQDIYKAVFQKGKKVTKKQLCKYLHTRGIIETEEQVTGVDVSINNALTTYGKFKPIFGEDISKDSVQKMIEDIVFWCTVYGDSKKFLKDRIEEKYGNKLSEEQIKRILGFKFKDWGNLSKKFLELNGADTSTGESISIIRALWNNNLNLMELINSSLYNYKECLAEYQNTMLKTLSEIEAEDLNEYYFSAPVRRMIWQTILVIKELVKVLGCEPERIFVEMTRRPDEHKTRTSSRRNKFEELYKKVKDETTDWMQVIANAEEDGKIRSKKMYLYLTQKGRCMYTGKHIELDDLFDNNLYDIDHIYPRHFVKDDNIDNNLVLVCKEKNAHKSDHYPIEEEIFLSQKKMWLELRKSGFITEEKYNRLMGRSPFSDEKKAGFIARQLVETSQGTKGVANILRQLLPGSKIVYAKASNVSEFRCTRDDIQKSRLVNDFHHAHDAYLNIVVGNVYYVKFTQNPLNFIKKDYDKYKEDYNLSKMFDWDVKRNGEVAWIAQRKDGAAGTITTVKRMLSRNTPLMTRYSFDGKGGLTNETLYSAKKAKGEGYIPFKSSDDKMQDVTKYGGFTSVTGAYFFLVEHTEKKKRIRTIESVPVYLAQKIEQNPDELKKYCEEILGLIDADIRLKKIKIGSLIKRNGYFCYITGKTVNRLIVRNAVNLCLKNEWIKYISKLEKVKEKDAVDKIITKEKNEVLYSELIQKFKHGIFSKRPNPVGDKLEKDSEKFNNLSIKDQCAVLCQVLRMAAILGSECDMTLLGDSPNCGKMLISKKIGDEEIYLINQSVTGLYEKKINLHTV

SEQ ID NO: 3076 - protein, 524 aa, unidentified
  REGION 1..524: note = Description of Unknown: uncultivated organism sequence
  REGION 1..524: note = Category: MG91 effectors
  REGION 1..524: note = Description: MG91-268 effector
MNEVFVLELPLQVEKYQADILNRRYEQLRQLYNYVQGKLLRQYRYFEQMKEYQACKTFKEKKDFLKNHPFQIKGVYGSNKELLDITFDEYGIQGFIEKLMHKPVGADMTYADLGINTYVLDRLSSSVWAAWEKKIYDYRAKRVSFKKYGELDSFSSRRKVSSGKIYFSGMELHLDTMELAVKTNGKVGKAAKFITLPILHNPKHADYEMWALKGGIDSVKVITVVRRLVRGQYKYYVQLSIEGEKPLKGRTLGKGNVGIDLGPTTVAISGNNNVSIDKLAPKCDNIQKEITKLSRKIDRSRRANNPQNFNEDGTIKRGIRLVWNDSKRYKALRRELAELQRRQAAIRKQQHIDRANELLKEGDTFIVENNSISGWATKAKETKVSEKTGKIQKKKRFGKSIANHAPAMFVNILENKVKSLGGQVVKVDTKNAASQYDFTDNSFEKHELNERNVTLSNGDTHQRDMLAAFNLQHLKYDAEESKQYDVEAMKEDYDRFCQLEKAEVMRYKNKEKKDDRSTIGAGKL

SEQ ID NO: 3077 - protein, 1352 aa, unidentified
  REGION 1..1352: note = Description of Unknown: uncultivated organism sequence
  REGION 1..1352: note = Category: MG91 effectors
  REGION 1..1352: note = Description: MG91-269 effector
MTAFKYYLGLDMGTNSVGWAATDPEYRLLKAKGKDLWGIREFNEASGAVERRTHRISRRRRQREQVRIGILKDYFHDAICEVDPSFFRRLENSKYHEEDKDVEVRYKNNIFNYGNYTDKDYFNEYPTIYHLRNELISSTEKHDVRLVFLALLNMFKHRGHFLNAGLGENNGESNIDNAYFELTELLSELTEYHLSQDIDCKQIEAILSRRDMSRTHKAEELAGVLHVDLKNKPYKELIRGLCGLKFNACVVFPDVQSEEVTKLDICLSESTFDEKSDEIANIIGEDYFEINIAKKEMFDIGSLASIMKGHNYLSQARVASYTKHKEDLKLLKEVIKKYCGKKEYDKFFNSDADGSYASYVGSYNSKNKERRVGNKRTSEELYKEIKKLLKDAQKEDENVQKILTSIENETFLPKQLTASNGVIPNQVHAREMKKILSNAENYLPFLTEKDETGLSVSERILKLFTFQIPYYVGPTSENSGKNGGNGWVVRREDGQVLPWNIDEKIDMKATSEAFISRMVRRCTYISGEQVLPKASLEYQSYCVLNEINNIKIDGERISVELKQDIYKAVFQKGKKVTKKQLCKYLYTRGIIETEEQVTGVDVSINSALTTYGKFKPIFGEDISKDSVQKMIEDIVFWCTVYGDSRKFLKARIEEKYGNKLSEEQIKRILGFKFKDWGNLSKKFLELNGADTSTGESISIIRALWNNNLNLMELINSSLYNYKECLAEYQNTMLKTLSEIEAEDLNEYYFSAPVRRMIWQTILVIKELVKVLGCEPERIFVEMTRKPDEHKTRTSSRRNKFEELYKKVKDETTDWMQVIANAEEDGKIRSKKMYLYLTQKGRCMYTGKHIELDDLFDNNLYDIDHIYPRHFVKDDNIDNNLVLVCKEKNAHKSDHYPIEEEIFLSQKKMWLELRKSGFITEEKYNRLMDRNPFSDEQKAGFIARQLVETSQGTKGVANILRQLLPGSKIVYAKASNVSEFRHTRDDIPKSRLVNDFHHAHDAYLNIVVGNVYYVKFTQNPLNFIKKDYDNYKEDYNLSKMFDWDVKRNGEVAWIAQRKDGEAGTITTVKKMLSRNTPLMTRYSFEGKGGLANETLYSAKKAKGEGYIPFKSSDDKMQDVTKYGGFTKVAGAYFFLVEHTEKKKRIRTIESVPVYLTRKIEQKPGELKKYCDEILGLVDADIRLKKIKIGSLIKRNGYFCYITGKTGNQLSVRNAVNLCLKNEWIKYISKLEKVKEKDTIDKIITKEKNEVLYSELIQKFKHCIFSKRPNPVGDKLEKGSEKFSNLSIKEQCAVLCQILQLAAVLGSECDMTLLGESAHCGKMLISKKIGDEEIYLINQSVTGLYEKKINLHTV

SEQ ID NO: 3078 - protein, 1358 aa, unidentified
  REGION 1..1358: note = Description of Unknown: uncultivated organism sequence
  REGION 1..1358: note = Category: MG91 effectors
  REGION 1..1358: note = Description: MG91-270 effector
MEKEYYLGLDMGTNSVGWAVTDDAYNLIRFKGKDMWGIREFDEANSAVERRTHRTSRRRKQRNAVRMGLIRSYFADEIQKVDSNFYQRLDNSFFHVEDKQDNVKDKNGIFNDKNYKDADYYKQYPTIFHLRKELIEDASQKDVRLVYLAVANMFKHRGHFLLSGIGSESSKQTITDLYNQVSGLITEEYGISLKTDIAGTDFEQVLCSREYSRTRKSEKVCEILEIKNSDKLKKAFVKSMCGLSVKITDIIDDTFTEISDEDKKITFSFVDSDYDEKAGVLEEKLGTDVYDIISKLKEIHDKAQVAEIMKNYQYLSFARVADYEKHKKDLKILKRVVKKYFEPTVYDKLFRSEENGTYSAYVNSFNSEEKSRRNYKERKQEDLYNSIKKLLKSVDNVDDTDIEYIKNEMDKENFLPKQLTFKNGVIPNQIHASELKAILKNAEKYLPFLNEKDESGYTVSERILMLFSFQIPYYVGPVSSNSNGWVKRLEPGQVLPWNIDKKIDLKETSEQFIQRMVRNCTYIAGEKVLPKASLLYENFKVLNEINNLSINGERITVNLKQDLYNTLFLKGKRVTRKQIFNYFHSRGLVEEDSQISGIDIAVNNSLSTYGKFLPLFGEHLKEDKYKKMVDDIVFWCTVYGDSRKFLREQLEEKYSDVLDENQIKRITGMKFKDWGNLSKEFLELSGCCKSTGEVMPLIRAMWETNYNLMELLHSEEFTYSEELEEKQGKIEKVLSEYTIDDLNEEYFSAPVKRMVWQTLLIIKEIEKIMKCPPTRIFVEMTRKDDEKGDNGRKSSRKDQLLALYKKIQSEDKEWKKEMSSRIEDYDKKGALRSKKLYLYFIQKGLDMYTGKPIDLDNLMSANSNYDIDHIYPRHFVKDDNINNNLVLASKPANAEKSDIYPIKDSIYQKMKYTWKVLRDEGLITEEKYKRLTGRNPFTDEQKAGFIARQLVETGQGTKGVADLLTALLPDTKLVYSKAGNVSDFRKKYDIPKSRLINDFHHAHDAYLNIVVGNIYFTKFTSNPLNYIRKECSSKDNKYQYNLGNMYKWDVKRDGKTAWIAAKEGETGTIATVKKMLSRNTPTLTRLTIEGHGGIADATLYSHKKAKQDAYIPLKSSDARMADVTKYGGYSSVTTAYLFLVEHEIKGKKIRTLETVPLYLKDRLENSKEKLEEYCRETLGYTNPSVRMKKIKLQSLIKLNGYYMQISGKTNKQFTVRNYVQFCLNSKWVDYIHKLEKYQDKGVIDDAITDEKNVELYNVLCEKHSVGIFTLRPNPVGDKIKKGYDKFVNLTTEEQIKLLIEIIKLTCVGIVSANLTLIGGASISGKMLISKNITDAKECLLINQSVTGLYENRIDLLRV

SEQ ID NO: 3079 - protein, 1358 aa, unidentified
  REGION 1..1358: note = Description of Unknown: uncultivated organism sequence
  REGION 1..1358: note = Category: MG91 effectors
  REGION 1..1358: note = Description: MG91-271 effector
MEKEYYLGLDMGTNSVGWAVTDDAYNLIRFKGKDMWGIREFDEANPAVERRTHRTSRRREQRNAVRMGLIRSYFADEIQKVDSNFYQRLDNSFFHVEDKQDNVKDKNGIFNDKNYKDADYYKQYPTIFHLRKELIEDASQKDVRLVYLAVANMFKHRGHFLLSGIGSESSKQTITDLYNQVSGLITEEYGISLKTDIAGTDFEQVLCSREYSRTRKSEKVCEILEIKNSDKLKKAFVKSMCGLSVKITDVIDDTFTEISDEDKKITFSFVDSDYDEKAGVLEEKLGTDVYDIISKLKEIHDKAQVAEIMKNYQYLSFARVADYEKHKKDLKILKRVVKKYFEPTVYDKLFRSGENGTYSAYVNSFNSGEKSRRNYKERKQEDLYNSIKKLLKSIDNVCDTDIEYIKNEIEKENFLPKQLTFKNGVIPNQIHASELKAILKNAEKYLPFLNEKDESGYTVSERILMLFSFQIPYYVGPVSSNSNGWVKRLEPGQVLPWNIDKKIDLKETSEQFIQRMVRNCTYIAGEKVLPKASLLYENFKVLNEINNLSINGERIAVALKQDLYNTLFLKGKRVTRKQIFNYFHSRGLVEEDSQISGIDIAVNNSLSTYGKFLPLFGEHLKEDKYKKMVDDIVFWCTVYGDSRKFLREQLEEKYSDVLDENQIKRITGMKFKDWGNLSKEFLELLGCCKSTGEMIPLIRAMWETNYNLMELLHSEEFTYSEELEEKQGKIEKVLSEYTIDDLNEEYFSAPVKRMVWQTLLIIKEIEKIMKCPPTRIFVEMTRKDDEKGDNGRKSSRKDQLLALYKKIQSEDKEWKKEMSSRIEDYDKNGALRSKKLYLYFIQKGLDMYTGKPIDLDNLMSANSNYDIDHIYPRHFVKDDNINNNLVLASKPANAEKSDIYPIKDSIYQKMKYTWKVLRDEGLITEEKYKRLTGRNPFTDEQKAGFIARQLVETGQGTKGVADLLTALLPDTKLVYSKAGNVSDFRKRYDIHKSRLINDFHHAHDAYLNIVVGNIYFTKFTSNPLNYIRKECSSKDNKYQYNLGNMYKWDVKRDGKTAWIAAKEGETGTLATVKKMLSRNTPILTRLAIEGHGGIADATLYSHKKAKQDAYIPLKSSDARMADVTKYGGYSSVTTAYLFLVEHEIKGKKIRTLETVPLYLKDRLENSKEKLEEYCRETLGYTNPSVRMKKIKLQSLIKLNGYYMQISGKTNKQFTVRNYVQFCLNSKWVDYIHKLEKYQDKGVIDDAITDEKNVELYNVLCEKHSVGIFTLRPNPVGDKIKKGYDKFVNLTTEEQIKLLIEIIKLTCVGIVSANLTLIGGASISGKMLISKNITDAKECLLINQSVTGLYENRIDLLRV

SEQ ID NO: 3080 - protein, 1358 aa, unidentified
  REGION 1..1358: note = Description of Unknown: uncultivated organism sequence
  REGION 1..1358: note = Category: MG91 effectors
  REGION 1..1358: note = Description: MG91-272 effector
MEKEYYLGLDMGTNSVGWAVTDDAYNLIRFKGKDMWGIREFDEANPAVERRTHRTSRRREQRNAVRMGLIRSYFADEIQKVDSNFYQRLDNSFFHVEDKQDNVKDKNGIFNDKNYKDADYYKQYPTIFHLRKELIEDDSQKDVRLVYLAVANMFKHRGHFLLSGIGSESSKQTITDLYNQVSGLITEEYGISLKTDIAGTDFEQVLCSREYSRTRKSEKVCEILEIKNSDKLKKAFVKSMCGLSVKITDIIDDTFTEISDEDKKITFSFVDSDYDEKAGVLEEKLGTDVYDIISKLKEIHDKAQVAEIMKNYQYLSFARVADYEKHKKDLKILKRVVKKHFEPTVYDKLFRSEENGTYSAYVNSFNSGEKSRRNYKERKQEDLYNSIKKLLKSVDNVYDTDIEYIKNEMDKENFLPKQLTFKNGVIPNQIHASELKAILKNAEKYLPFLNEKDESGYTVSERILMLFSFQIPYYVGPVSSNSNGWVKRLESGQVLPWNIDKKIDLKETSEQFIQRMVRNCTYIAGEKVLPKASLLYENFKVLNEINNLSINGERITVNLKQDLYNTLFLKGKRVTRKQIFNYFHSRGLVEEDSQISGIDIAVNNSLSTYGKFLPLFGEHLKEDKYKKMVDDIVFWCTVYGDSRKFLREQLEEKYSDVLDENQVKRITGMKFKDWGNLSKEFLELSGCCKSTGEVMPLIRAMWETNYNLMELLHSEEFTYSEELEEKQGKIEKVLSEYTIDDLNEEYFSAPVKRMVWQTLLIIKEIEKIMKCPPTRIFVEMTRKDDEKGDNGRKSSRKDQLLALYKKIQSEDKEWKKEMSSRIEDYDKKGALRSKKLYLYFIQKGLDMYTGKPIDLDNLMSANSNYDIDHIYPRHFVKDDNINNNLVLASKPANAEKSDIYPIKDSIYQKMKYTWKVLRDEGLITEEKYKRLTGRNPFTDEQKAGFIARQLVETGQGTKGVADLLTALLPDTKLVYSKAGNVSDFRKRYDIPKSRLINDFHHAHDAYLNIVVGNIYFTKFTSNPLNYIRKECSSKDNKYQYNLGNMYKWDVKRDGKTAWVAPEEGETGTLATVKKMLSRNTPILTRLTIEGHGGIADATLYSHKKAKQDTYIPLKSSDARMADVTKYGGYSSVTTAYLFLVEHEIKGKKIRTLETVPIYLKDRLENSKEKLEEYCRETLGYTNPSVRMKKIKLQSLIKLNGYYMQISGRTGNRFTLRNYVQLCLNGKWVDYIHKLEKYQDKGVIDDLITDERNVELYNVLCEKHSVGIFTLRPNLVGDKIKNGYDKFVNLTTEEQIKLLIEIIKLTCVGIVSANLTLIGGAAISGKMLMSKNITYANECILINQSVTGLYENRIDLLRV

SEQ ID NO: 3081 - protein, 1358 aa, unidentified
  REGION 1..1358: note = Description of Unknown: uncultivated organism sequence
  REGION 1..1358: note = Category: MG91 effectors
  REGION 1..1358: note = Description: MG91-273 effector
MEKEYYLGLDMGTNSVGWAVTDDAYNLIRFKGKDMWGIREFDEANPAVERRTHRTSRRREQRNAVRMGLIRSYFADEIQKVDSNFYQRLDNSFFHVEDKQDNVKDKNGIFNDKNYKDADYYKQYPTIFHLRKELIEDASQKDVRLVYLAVANMFKHRGHFLLSGIGSESSKQTITDLYNQVSGLITEEYGISLKTDIAGTDFEQVLCSREYSRTRKSEKVCEILEIKNSDKLKKAFVKSMCGLSVKITDVIDDTFTEISDEDKKITFSFVDSDYDEKAGVLEEKLGTDVYDIISKLKEIHDKAQVAEIMKNYQYLSFARVADYEKHKKDLKILKRVVKKYFEPTVYDKLFRSGENGTYSAYVNSFNSGEKSRRNYKERKQEDLYNSIKKLIKSIDNVCDTDIEYIKNEIEKENFLPKQLTFKNGVIPNQIHASELKAILKNAEKYLPFLNEKDESGYTVSERILMLFSFQIPYYVGPVSSNSNGWVKRLEPGQVLPWNIDKKIDLKETSEQFIQRMVRNCTYIAGEKVLPKASLLYENFKVLNEINNLSINGERIAVALKQDLYNTLFLKGKRVTRKQIFNYFHSRGLVEEDSQISGIDIAVNNSLSTYGKFLPLFGEHLKEDKYKKMVDDIVFWCTVYGDSRKFLREQLEEKYSDVLDENQIKRITGMKFKDWGNLSKEFLELSGCCKSTGEMIPLIRAMWETNYNLMELLHSEEFTYSEELEEKQGKIEKVLSEYTIDDLNEEYFSAPVKRMVWQTLLIIKEIEKIMKCPPTRIFVEMTRKDDEKGDNGRKSSRKDQLLALYKKIQSEDKEWKKEMSSRIEDYDKNGALRSKKLYLYFIQKGLDMYTGKPIDLDNLMSANSNYDIDHIYPRHFVKDDNINNNLVLASKPANAEKSDIYPIKDSIYQKMKYTWKVLRDEGLITEEKYKRLTGRNPFTDEQKAGFIARQLVETGQGTKGVADLLTALLPGTKLVYSKAGNVSDFRKKYDIPKSRLINDFHHAHDAYLNIVVGNIYFTKFTSNPLNYIRKECSSKDNKYQYNLGNMYKWDVKRDGKTAWIAAKEGETGTLATVKKMLSRNTPILTRLAIEGHGGIADATLYSHKKAKQDAYIPLKSSDARMADVTKYGGYSSVTTAYLFLVEHEIKGKKIRTLETVPLYLKDRLENSKEKLEEYCRETLGYTNPSVRMKKIKLQSLIKLNGYYMQISGKTNKQFTVRNYVQFCLNSKWVDYIHKLEKYQDKGVIDDAITDEKNVELYNVLCEKHSVGIFTLRPNPVGDKIKKGYDKFVNLTTEEQIKLLIEIIKLTCVGIVSANLTLIGGASISGKMLISKNITDAKECLLINQSVTGLYENRIDLLRV

SEQ ID NO: 3082 - protein, 1352 aa, unidentified
  REGION 1..1352: note = Description of Unknown: uncultivated organism sequence
  REGION 1..1352: note = Category: MG91 effectors
  REGION 1..1352: note = Description: MG91-274 effector
MTAFKYYLGLDMGTNSVGWAATDPEYRLLKAKGKDLWGIREFNEASGAVERRTHRISRRRRQREQVRIGILKDYFHDAICEVDPSFFRRLENSKYHEEDKDVEVRYKNNIFNDGNYTDKDYFNEYPTIYHLRNELISSTEKHDVRLVFLALLNMFKHRGHFLNAGLGENNGESNIDNAYFELTELLSELTEYHLSQDIDCKQIEAILSRRDMSRTHKAEELAGVLHVDLKNKPYKELIRGLCGLKFNACVVFPDVQSEEVTKLDICLSESSFDEKSDEIANIIGEDYFEIIMAMKEMFDIGSLASIMKGHNYLSQARVASYTKHKEDLKLLKEVIKKYCGKKEYDKFFNSDADGSYASYVGSYNSKNKERRVGNKRTSEELYKEIKKLLKDAPKEDENVQKILTSIENETFLPKQLTASNGVIPNQVHAREMKKILSNAENYLPFLTEKDETGLSVSERILKLFTFQIPYYVGPTSENSGKNGGNGWVVRREDGQVLPWNIDEKIDMKATSEAFISRMVRRCTYISGEQVLPKASLEYQSYCVLNEINNIKIDGERISVELKQDIYKAVFQKGKKVTKKQLCKYLHTRGIIETEEQVTGVDVSINNALTTYGKFKPIFGEDISKDSVQKMIEDIVFWCTVYGDSKKFLKDRIEEKYGNKLSEEQIKRILGFKFKDWGNLSKKFLELNGADTSTGESISIIRALWNNNLNLMELINSSLYNYKECLAEYQNTMLKTLSEIEAEDLNEYYFSAPVRRIIWQTILVIKELVKVLGCEPERIFVEMTRKPDEHKTRTSSRRNKFEELYKKVKDEATDWMQVIAKAEEDGKIRSKKMYLYLTQKGRCMYTGKHIELDDLFDKNLYDIDHIYPRHFVKDDNIDNNLVLVCKEKNAHKSDHYPIEEEIFLSQKKMWLELRKSGFITEEKYNRLMGRSPFSDEKKAGFIARQLVETSQGTKGVANILRQLLPGSKIVYAKASNVSEFRHTRDDIPKSRLVNDFHHAHDAYLNIVVGNVYYVKFTQNPLNFIKKDYDKYKEDYNLSKMFDWDVKRNGEVAWIAQRKDGEAGTITTVKRMLSRNTPLMTRYSFEGKGGLANETLCSAKKAKGEGYIPFKSSDDKMQDVTKYGGFTKVTGAYFFLVEHTEKKKRIRTIESVPVYLAQKIEQNPDELKKYCEEILGLVDADIRLKKIKIGSLIKRNGYFCYITGKTGNRLSVRNAVNLCLKNEWIKYISKLEKVKEKDAVDEIITKEKNEVLYSELIQKFKHGIFSKRPNPVEDKLEKGSEKFSNLSIKEQCAVLCQILQLAAVLGSECDMTLLGESAHCGKMLISKKIGDEEIYLLNQSVTGLYEKKINLHTV

SEQ ID NO: 3083 - protein, 1342 aa, unidentified
  REGION 1..1342: note = Description of Unknown: uncultivated organism sequence
  REGION 1..1342: note = Category: MG91 effectors
  REGION 1..1342: note = Description: MG91-275 effector
MRYFMGLDMGTSSVGWAVTDEHYQLLRRKGKDMWGIREFEEAATAVERRTHRVSRRRRQRQVARIGLLQEYFHDAIHQVDPNFYQRLKNSKYHEEDKDEIVRESNGIFNDAEYTDKEYFKEFPTIFHLRQELIKSKEPHDVRLVYLALLNMFKHRGHFLNATLSADGESRKIKDIYTDFVDKAAEQLGVSFATDIRYEELENYLSSNDLSRKRKGELIAELLHVTRKDKQQYALIECMLGLDKSVKLMFGDTLPEDFDKTIKVNFSDIAFEEKATEISEAIGEEKYDLILIMKEIYDAAILNRIMNGYTYLSDARVAEYEKHKSDLACLKHYIKEYGTQHQFDFLFRGTEKGSYSAYVHSVNSHEKQRRNMDGNKKEDLYSTLKKILKDMPENEEKTYIMMQIELDNFLPKQLTASNGVIPNQIHLKEMKKILANAENYLPFLKEKDESGYTVSERIQKLFAFQIPYYIGPTTEKSAEFGGNGWVVRKEEGKVLPWNIDQKIDMKKTSEKFISRMVRRCTYMNDEQVLPKESLEYESFCVLNELNNIKVYGEKLPVDIKQDIYRTLCEKGKRVTKKSLMQYLVGRGVIKAEDEEQLTGLMDGLNNTLKSFAKFKAIFGDAIYEDSCKKMVEQIIFWCTVYGDSKHFLKEQLLEKYGEVLTDAQIKRILGIKFRDWGNLSKKFLELQGCSKETGEVNSLIRMLWETNDNLMELLAQDSYTFKEELENMQESTYKVLTELQPEDLDHMYFSAPVKRMIWQTILIIKEVTKVMGCQPERLFIEMTREHGQKNDIKDSRAKKFYELYSKIKDEDKDWRKVIEDADKDGRIRSKKMYLYLTQMGRCMYTGRPIDLDQLFNNNLYDIDHIYPRHYVKDDNLENNMVLVEKQSNAHKSDVYPLESGIYEKQVNWWRELHRKNLINDEKLKRLTGRNPFTDEQKAGFIARQLVETSQGTKGVATILQEALPDTTLVYAKARNVSEFRSDNDLLKSRIVNDFHHAHDAYLNIVIGNVYYVKFTKNPINFIREHGTYNLGKMFAKDVKRGDDIGWVAQSGNGQTATMETIKRTMARNTPLLTRMSYEVTGGLANQTLYSASKAKEGTYIPLKSSDERMQDVTKYGGFTSVSTAYFMLVEHDGKKGKRIRTIESVPIMWKERIEKNPAELERYCLEVLKLSNPDIRVRKILIQSLIKRNGYYMQITGKTGNQLYVRNTVSLCLKQEWVNYIKKLEKGNDENITKDKNLVLYDILVDKHNNTIYSQRPNPVGEKLVKRREEFINLNLNDQVTVLLEILKLTQIALGGANLELINESKTTGSMKISKTVSEEREVTLINQSVTGLYEQRVNLLTV

SEQ ID NO: 3084 - protein, 1342 aa, unidentified
  REGION 1..1342: note = Description of Unknown: uncultivated organism sequence
  REGION 1..1342: note = Category: MG91 effectors
  REGION 1..1342: note = Description: MG91-276 effector
MRYFMGLDMGTSSVGWAVTDEHYQLLRRKGKDMWGIREFEEAATAVERRTHRVSRRRRQRQVARIGLLQEYFHDAIHQVDPNFYQRLKNSKYHEEDKDEIVRESNGIFNDAEYTDKEYFKEFPTIFHLRQELIKSKEPHDVRLVYLALLNMFKHRGHFLNATLSADGESRKIKDIYTDFVDKAAEQLGVSFATDIRYEELENYLSSNDLSRKRKGELIAELLHVTRKDKQQYALIECMLGLDKSVKLMFGDTLPEDFDKTIKVNFSDIAFEEKATEISEAIGEEKYDLILIMKEIYDAAILNRIMNGYTYLSDARVAEYEKHKSDLACLKHYIKEYGTQQQFDFLFRGTEKGSYSAYVHSVNSHEKQRRNMAGNKKEDLYSALKKMLKDMPENEEKTCIMMQIELDNFLPKQLTASNGVIPNQIHLKEMKKILANAENYLPFLKEKDESGYTVSERIQKLFAFQIPYYIGPTTEKSAEFGGNGWVVRKEEGKVLPWNIDQKIDMKKTSEKFISRMVRRCTYMNDEQVLPKESLVYESFCVLNELNNIKVYGEKLPVDIKQDIYRTLCEKGKRVTKKSLMQYLVGRGVIKAEDEEQLTGLMDGLNNTLKSFAKFKAIFGDAIYEDSCKKMVEQIIFWCTVYGDSKHFLKEQLLEKYGEVLTGAQIKRILGIKFRDWGNLSKKFLELQGCSKETGEVNSLIRMLWETNDNLMELLAQDSYTFKEELENMQESTYKVLTELQPEDLDHMYFSAPVKRMVWQTILIIKEVTKVMGCQPERLFIEMTREHGQKNDIKDSRAKKFYELYSKIKDEDKDWRKVIEDADKDGRIRSKKMYLYLTQMGRCMYTGRPIDLDQLFNNNLYDIDHIYPRHYVKDDNLENNMVLVEKQSNAHKSDVYPLESGIYEKQVNWWRELHRKNLINDEKLKRLTGRNPFTDEQKAGFIARQLVETSQGTKGVATILQEALPDTTLVYAKARNVSEFRSDNDLLKSRIVNDFHHAHDAYLNIVIGNVYYVKFTKNPINFIREHGTYNLGKMFAKDVKRGDDIGWVAQSGNGQTATMETIKRTMARNTPLLTRMSYEVTGGLANQTLYSASRAKEGTYIPLKSSDERMQDVTKYGGFTSVSTAYFMLVEHDGKKGKRIRTIESVPIMWKERIEKNPAELERYCLDVLKLSNPDIRVRKILIQSLIKRNGYYMQITGKTGNRMYVRNMVSLCLVQDWVNYIKKLEKDKDENISKEKNIRLYDVLMDKHINTIYNTRPNPVGDLLIKRRSDFIELKITDQVIILLEILKLTQTALGSANLKLIGEAEKTGVMLISKDITALDEMLLINQSVTGLYEQRVNLLTV

SEQ ID NO: 3085 - protein, 1342 aa, unidentified
  REGION 1..1342: note = Description of Unknown: uncultivated organism sequence
  REGION 1..1342: note = Category: MG91 effectors
  REGION 1..1342: note = Description: MG91-277 effector
MRYFMGLDMGTSSVGWAVTDEHYQLLRRKGKDMWGIREFEEAATAVERRTHRVSRRRRQRQVARIGLLQEYFHDAIHQVDPNFYQRLKNSKYHEEDKDEIVRGSNGIFNDVEYTDKEYFKEFPTIFHLRQELIKSKEPHDVRLVYLALLNMFKHRGHFLNATLSADGESRKIKDIYTDFVDKVAEQLGVSFATDIRYEELENYLSSNDLSRKRKGELIAELLHVTRKDKQQYALIECMLGLDKSVKLMFGDTLPEDFDKTIKVNFSDIAFEEKATEISEAIGEEKYDLILIMKEIYDAAILNRIMNGYTYLSDARVAEYEKHKSDLACLKHYIKEYGTQHQFDFLFRGTEKGSYSAYVHSVNSHEKQRRNMDGNKKEDLYSTLKKILKDMPENEEKTYIMMQIELDNFLPKQLTASNGVIPNQIHLKEMKKILANAENYLPFLKEKDESGYTVSERIQKLFAFQIPYYIGPTTEKSAEFGGNGWVVRKEEGKVLPWNIDQKIDMKKTSEKFISRMVRRCTYMNDEQVLPKESLEYESFCVLNELNNIKVYGEKLPVDIKQDIYRTLCEKGKRVTKKSLMQYLVGRGVIKAEDEEQLTGLMDGLNNTLKSFAKFKAIFGDAIYEDSCKKMVEQIIFWCTVYGDSKHFLKEQLLEKYGEVLTGAQIKRILGIKFRDWGNLSKKFLELQGCSKETGEVNSLIRMLWETNDNLMELLAQDSYTFKEELENMQESAYKVLTELQPEDLDHMYFSAPVKRMIWQTILIIKEVTKVMGCQPERLFIEMTREHGQKNDIKDSRAKKFYELYSKIKDEDKDWRKVIEDADKDGRIRSKKMYLYLTQMGRCMYTGRPIDLDQLFNNNLYDIDHIYPRHYVKDDNLENNMVLVEKQSNAHKSDVYPLESGIYEKQVNWWRELHRKNLINDEKLKRLTGRNPFTDEQKAGFIARQLVETSQGTKGVATILQEALPDTTLVYAKARNVSEFRSDNDLLKSRIVNDFHHAHDAYLNIVIGNVYYVKFTKNPINFIREHGTYNLGKMFAKDVKRGDDIGWVAQSGNGQTATMETIKRTMARNTPLLTRMSYEVTGGLANQTLYSASKAKEGTYIPLKSSDERMQDVTKYGGFTSVSTAYFMLVEHDGKKGKRIRTIESVPIMWKERIEKNPAELERYCLDVLKLSNPDIRVRKILIQSLIKRNGYYMQITGKTGNQLYVRNTVSLCLKQEWVNYIKKLEKGNDENITKDKNLVLYDILVDKHNNTIYSQRPNPVGEKLVKRREEFINLNLNDQVTVLLEILKLTQIALGGANLKLIGEAEKTGVMLISKDITTLDEMLLINQSVTGLYEQKVNLLTV

SEQ ID NO: 3086 - protein, 1342 aa, unidentified
  REGION 1..1342: note = Description of Unknown: uncultivated organism sequence
  REGION 1..1342: note = Category: MG91 effectors
  REGION 1..1342: note = Description: MG91-278 effector
MRYFMGLDMGTSSVGWAVTDEHYQLLRRKGKDMWGIREFEEAATAVERRTHRVSRRRRQRQVARIGLLQEYFHDAIHQVDPNFYQRLKNSKYHEEDKDEIVRESNGIFNDAEYTDKEYFKEFPTIFHLRQELIKSKEPHDVRLVYLALLNMFKHRGHFLNATLSADGESRKIKDIYTDFVDKAAEQLGVSFATDIRYEELENYLSSNDLSRKRKGELIAELLHVTRKDKQQYALIECMLGLDKSVKLMFGDTLPEDFDKTIKVNFSDIAFEEKATEISEAIGEEKYDLILIMKEIYDAAILNRIMNGYTYLSDARVAEYEKHKSDLACLKHYIKEYGTQQQFDFLFRGTEKGSYSAYVHSVNSHEKQRRNMAGNKKEDLYSALKKMLKDMPENEEKTCIMMQIELDNFLPKQLTASNGVIPNQIHLKEMKKILANAENYLPFLKEKDESGYTVSERIQKLFAFQIPYYIGPTTEKSAEFGGNGWVVRKEEGKVLPWNIDQKIDMKKTSEKFISRMVRRCTYMNDEQVLPKESLEYESFCVLNELNNIKVYGEKLPVDIKQDIYRTLCEKGKRVTKKSLMQYLVGRGVIKAEDEEQLTGLMDGLNNTLKSFAKFKAIFGDAIYEDSCKKMVEQIIFWCTVYGDSKHFLKEQLLEKYGEVLTGAQIKRILGIKFRDWGNLSKKFLELQGCSKETGEVNSLIRMLWETNDNLMELLAQDSYTFKEELENMQASTYKVLTELQPEDLDHMYFSAPVKRMIWQTILIIKEVTKVMGCQPERLFIEMTREHGQKNDIKDSRAKKFYELYSKIKDEDKDWRKVIEDADKDGRIRSKKMYLYLTQMGRCMYTGRPIDLDQLFNNNLYDIDHIYPRHYVKDDNLENNMVLVEKQSNAHKSDVYPLESGIYEKQVNWWRELHRKNLINDEKLKRLTGRNPFTDEQKAGFIARQLVETSQGTKGVATILQEALPDTTLVYAKARNVSEFRSDNDLLKSRIVNDFHHAHDAYLNIVIGNVYYVKFTKNPINFIREHGTYNLGKMFAKDVKRGDDIGWVAQSGNGQTATMETIKRTMARNTPLLTRMSYEVTGGLANQTLYSASKAKEGTYIPLKSSDERMQDVTKYGGFTSVSTAYFMLVEHDGKKGKRIRTIESVPIMWKERIEKNPAELERYCLDVLKLSNPDIRVRKILIQSLIKRNGYYMQITGKTGNRMYVRNMVSLCLVQDWVNYIKKLEKDKDENISKEKNIRLYDVLMDKHINTIYNTRPNPVGDLLIKRRSDFIELKITDQVIILLEILKLTQTALGSANLKLIGEAEKTGVMLISKDITALDEMLLINQSVTGLYEQRVNLLTV

SEQ ID NO: 3087 - protein, 1342 aa, unidentified
  REGION 1..1342: note = Description of Unknown: uncultivated organism sequence
  REGION 1..1342: note = Category: MG91 effectors
  REGION 1..1342: note = Description: MG91-279 effector
MRYFMGLDMGTSSVGWAVTDEHYQLLRRKGKDMWGIREFEEAATAVERRTHRVSRRRRQRQVARIGLLQEYFHDAIHQVDPNFYQRLKNSKYHEEDKDEIVRESNGIFNDAEYTDKEYFKEFPTIFHLRQELIKSKEPHDVRLVYLALLNMFKHRGHFLNATLSADGESRKIKDIYTDFVDKAAEQLGVSFATDIRYEELENYLSSNDLSRKRKGELIAELLHVTRKDKQQYALIECMLGLDKSVKLMFGDTLPEDFDNTIKVNFSDIAFEEKATEISEAIGEEKYDLILIMKEIYDAAILNRIMNGYTYLSDARVAEYEKHKSDLACLKHYIKEYGTQQQFDFLFRGTEKGSYSAYVHSVNSHEKQRRNMAGNKKEDLYSALKKMLKDMPENEEKTCIMMQIELDNFLPKQLTASNGVIPNQIHLKEMKKILANAENYLPFLKEKDESGYTVSERIQKLFAFQIPYYIGPTTEKSAEFGGNGWVVRKEEGKVLPWNIDQKIDMKKTSEKFISRMVRRCTYMNDEQVLPKESLEYESFCVLNELNNIKVYGEKLPVDIKQDIYRTLCEKGKRVTKKSLMQYLVGRGVIKAEDEEQLTGLMDGLNNTLKSFAKFKAIFGDAIYEDSCKKMVEQIIFWCTVYGDSKHFLKEQLLEKYGEVLTGAQIKRILGIKFRDWGNLSKKFLELQGCSKETGEVNSLIRMLWETNDNLMELLAQDSYTFKEELENMQESTYKVLTELQPEDLDHMYFSAPVKRMIWQTILIIKEVTKVMGCQPERLFIEMTREHGQKNDIKDSRAKKFYELYSKIKDEDKDWRKVIEDADKDGRIRSKKMYLYLTQMGRCMYTGRPIDLDQLFNNNLYDIDHIYPRHYVKDDNLENNMVLVEKQSNAHKSDVYPLESGIYEKQVNWWRELHRKNLINDEKLKRLTGRNPFTDEQKAGFIARQLVETSQGTKGVATILQEALPDTTLVYAKARNVSEFRSDNDLLKSRIVNDFHHAHDAYLNIVIGNVYYVKFTKNPINFIREHGTYNLGKMFAKDVKRGDDIGWVAQSGNGQTATMETIKRTMARNTPLLTRMSYEVTGGLANQTLYSASKAKEGTYIPLKSSDERMQDVTKYGGFTSVSTAYFMLVEHDGKKGKRIRTIESVPIMWKERIEKNPAELERYCLDVLKLSNPDIRVRKILIQSLIKRNGYYMQITGKTGNQLYVRNTVSLCLKQEWVNYIKKLEKGNDENITKDKNLVLYDILVDKHNNTIYSQRPNPVGEKLVKRREEFINLNLNDQVTVLLEILKLTQIALGGANLKLIGEAEKTGVMLISKDITTLDEMLLINQSVTGLYEQKVNLLTV

SEQ ID NO: 3088 - protein, 1342 aa, unidentified
  REGION 1..1342: note = Description of Unknown: uncultivated organism sequence
  REGION 1..1342: note = Category: MG91 effectors
  REGION 1..1342: note = Description: MG91-280 effector
MRYFMGLDMGTSSVGWAVTDEHYQLLRRKGKDMWGIREFEEAATAVERRTHRVSRRRRQRQVARIGLLQEYFHDAIHQVDPNFYQRLKNSKYHEEDKDEIVRESNGIFNDAEYTDKEYFKEFPTIFHLRQELIKSKEPHDVRLVYLALLNMFKHRGHFLNATLSADGESRKIKDIYTDFVDKAAEQLGVSFATDIRYEELENYLSSNDLSRKRKGELIAELLHVTRKDKQQYALIECMLGLDKSVKLMFGDTLPEDFDKTIKVNFSDIAFEEKATEISEAIGEEKYDLILIMKEIYDAAILNRIMNGYTYLSDARVAEYEKHKSDLACLKHYIKEYGTQQQFDFLFRGTEKGSYSAYVHSVNSHEKQRRNMAGNKKEDLYSALKKMLKDMPENEEKTCIMMQIELDNFLPKQLTASNGVIPNQIHLKEMKKILANAENYLPFLKEKDESGYTVSERIQKLFAFQIPYYIGPTTEKSAEFGGNGWVVRKEEGKVLPWNIDQKIDMKKTSEKFISRMVRRCTYMNDEQVLPKESLEYESFCVLNELNNIKVYGEKLPVDIKQDIYRTLCEKGKRVTKKSLMQYLVGRGVIKAEDEEQLTGLMDGLNNTLKSFAKFKAIFGDAIYEDSCKKMVEQIIFWCTVYGDSKHFLKEQLLEKYGEVLTGAQIKRILGIKFRDWGNLSKKFLELQGCSKETGEVNSLIRMLWETNDNLMELLAQDSYTFKEELENMQESTYKVLTELQPEDLDHMYFSAPVKRMIWQTILIIKEVTKVMGCQPERLFIEMTREHGQKNDIKDSRAKKFYELYSKIKDEDKDWRKVIEDADKDGRIRSKKMYLYLTQMGRCMYTGRPIDLDQLFNNNLYDIDHIYPRHYVKDDNLENNMVLVEKQSNAHKSDVYPLESGIYEKQVNWWRELHRKNLINDEKLKRLTGRNPFTDEQKAGFIARQLVETSQGTKGVATILQEALPDTTLVYAKARNVSEFRSDNDLLKSRIVNDFHHAHDAYLNIVIGNVYYVKFTKNPINFIREHGTYNLGKMFAKDVKRGDDIGWVAQSGNGQTATMETIKRTMARNTPLLTRMSYEVTGGLANQTLYSASKAKEGTYIPLKSSDERMQDVTKYGGFTSVSTAYFMLVEHDGKKGKRIRTIESVPIMWKERIEKNPAELERYCLDVLKLSNPDIRVRKILIQSLIKRNGYYMQITGKTGNQLYVRNTVSLCLKQEWVNYIKKLEKGNDENITKDKNLVLYDILVDKHNNTIYSQRPNPVGEKLVKRREEFINLNLNDQVTVLLEILKLTQIALGGANLKLIGEAEKTGVMLISKDITTLDEMLLINQSVTGLYEQKVNLLTV

SEQ ID NO: 3089 - protein, 1342 aa, unidentified
  REGION 1..1342: note = Description of Unknown: uncultivated organism sequence
  REGION 1..1342: note = Category: MG91 effectors
  REGION 1..1342: note = Description: MG91-281 effector
MRYFMGLDMGTSSVGWAVTDEHYQLLRRKGKDMWGIREFEEAATAVERRTHRVSRRRRQRQVARIGLLQEYFHDAIHQVDPNFYQRLKNSKYHEEDKDEIVRESNGIFNDAEYTDKEYFKEFPTIFHLRQELIKSKEPHDVRLVYLALVNMFKHRGHFLNATLSADGESRKIKDIYTDFVDKAAEQLGVSFATDIRYEELENYLSSNDLSRKRKGELIAELLHVTRKDKQQYALIECMLGLDKSVKLMFGDTLPEDFDKTIKVNFSDIAFEEKATEISEAIGEEKYDLILIMKEIYDAAILNRIMNGYTYLSDARVAEYEKHKSDLACLKHYIKEYGTQQQFDFLFRGTEKGSYSAYVHSVNSHEKQRRNMAGNKKEDLYSALKKMLKDMPENEEKTCIMMQIELDNFLPKQLTASNGVIPNQIHLKEMKKILANAENYLPFLKEKDESGYTISERIQKLFAFQIPYYIGPTTEKSAEFGGNGWVVRKEEGKVLPWNIDQKIDMKKTSEKFISRMVRRCTYMNDEQVLPKESLEYESFCVLNELNNIKVYGEKLPVDIKQDIYRTLCEKGKRVTKKSLMQYLVGRGVIKAEDEEQLTGLMDGLNNTLKSFAKFKAIFGDAIYEDSCKKMVEQIIFWCTVYGDSKHFLKEQLLEKYGEVLTDAQIKRILGIKFRDWGNLSKKFLELQGCSKETGEVNSLIRMLWETNDNLMELLAQDSYTFKEELENMQESTYKVLTELQPEDLDHMYFSAPVKRMIWQTILIIKEVTKVMGCQPERLFIEMTREHGQKNDIKDSRAKKFYELYSKIKDEDKDWRKVIEDADKDGRIRSKKMYLYLTQMGRCMYTGRPIDLDQLFNNNLYDIDHIYPRHYVKDDNLENNMVLVEKQSNAHKSDVYPLESGIYEKQVNWWRELHRKNLINDEKLKRLTGRNPFTDEQKAGFIARQLVETSQGTKGVATILQEALPDTTLVYAKARNVSEFRSDNDLLKSRIVNDFHHAHDAYLNIVIGNVYYVKFTKNPINFIREHGTYNLGKMFAKDVKRGDDIGWVAQSGNGQTATMETIKRTMARNTPLLTRMSYEVTGGLANQTLYSASKAKEGTYIPLKSSDERMQDVTKYGGFTSVSTAYFMLVEHDGKKGKRIRTIESVPIMWKERIEKNPAELERYCLEVLKLSNPDIRVRKILIQSLIKRNGYYMQITGKTGNQLYVRNTVSLCLKQEWVNYIKKLEKGNDENITKDKNLVLYDILVDKHNNTIYSQRPNPVGEKLVKRREEFINLNLNDQVTVLLEILKLTQIALGGANLKLIGEAEKTGVMLISKDITTLDEMLLINQSVTGLYEQKVNLLTV

SEQ ID NO: 3090 - protein, 1342 aa, unidentified
  REGION 1..1342: note = Description of Unknown: uncultivated organism sequence
  REGION 1..1342: note = Category: MG91 effectors
  REGION 1..1342: note = Description: MG91-282 effector
MRYFMGLDMGTSSVGWAVTDEHYQLLRRKGKDMWGIREFEEAATAVERRTHRVSRRRRQRQVARIGLLQEYFHDAIHQVDPNFYQRLKNSKYHEEDKDEIVRESNGIFNDAEYTDKEYFKEFPTIFHLRQELIKSKEPHDVRLVYLALLNMFKHRGHFLNATLSADGESRKIKDIYTDFVDKAAEQLGVSFATDIRYEELENYLSSNDLSRKRKGELIAELLHVTRKDKQQYALIECMLGLDKSVKLMFGDTLPEDFDKTIKVNFSDIAFEEKATEISEAIGEEKYDLILIMKEIYDAAILNRIMNGYTYLSDARVAEYEKHKSDLAYLKHYIKEYGTQQQFDFLFRGTEKGSYSAYVHSVNSHEKQRRNMAGNKKEDLYSALKKMLKDMPENEEKTYIMMQIELDNFLPKQLTASNGVIPNQIHLKEMKKILANAENYLPFLKEKDESGYTVSERIQKLFAFQIPYYIGPTTEKSAEFGGNGWVVRKEEGKVLPWNIDQKIDMKKTSEKFISRMVRRCTYMNDEQVLPKESLEYESFCVLNELNNIKVYGEKLPVDIKQDIYRTLCEKGKRITKKSLMQYLVGRGVIKAEDEEQLTGLMDGLNNTLKSFAKFKAIFGDAIYEDSCKKMVEQIIFWCTVYGDSKHFLKEQLLEKYGEVLTDAQIKRILGIKFRDWGNLSKKFLGLQGCSKETGEVNSLIRMLWETNDNLMELLAQDSYTFKEELENMQESTYKVLIELQPEDLDHMYFSAPVKRMIWQTILIIKEVTKVMGCQPERLFIEMTREHGQKNDIKDSRAKKFYELYSKIKDEDKDWRKVIEDADKDGRIRSKKMYLYLTQMGRCMYTGRPIDLDQLFNNNLYDIDHIYPRHYVKDDNLENNMVLVEKQSNAHKSDVYPLESGIYEKQVNWWRELHRKNLINDEKLKRLTGRNPFTDEQKAGFIARQLVETSQGTKGVATILQEALPDTTLVYAKARNVSEFRSDNDLLKSRIVNDFHHAHDAYLNIVIGNVYYVKFTKNPINFIREHGTYNLGKMFAKDVKRGDDIGWVAQSGNGQTATMETIKRTMARNTPLLTRMSYEVTGGLANQTLYSASKAKEGTYIPLKSSDERMQDVTKYGGFTSVSTAYFMLVEHDGKKGKRIRTIESVPIMWKERIEKNPAELERYCLEVLKLSNPDIRVRKILIQSLIKRNGYYMQITGKTGNRVYVRNMVSLCLVQDWVNYIKKLEKDKDENISKEKNIRLYDVLMDKHINTIYNTRPNPVGDLLIKRRSDFIELKITDQVIILLEILKLTQTALGSANLKLIGEAEKTGVMLISKDITALEEMLLINQSVTGLYEQRVNLLTV

SEQ ID NO: 3091 - protein, 1358 aa, unidentified
  REGION 1..1358: note = Description of Unknown: uncultivated organism sequence
  REGION 1..1358: note = Category: MG91 effectors
  REGION 1..1358: note = Description: MG91-283 effector
MEKEYYLGLDMGTNSVGWAVTDDAYNLIRFKGKDMWGIREFDEANPAVERRTHRTSRRRKQRNAVRMGLIRSYFADEIQKVDSNFYQRLDNSFFHVEDKQDNVKDKNGIFNDKNYKDADYYKQYPTIFHLRKELIEDASQKDVRLVYLAVANMFKHRGHFLLSGIGSESSKQTITDLYNQVSGLITEEYGISLKTDIAGTDFEQVLCSREYSRTRKSEKVCEILEIKNSDKLKKAFVKSMCGLSVKITDIIDDTFTEISDEDKKITFSFVDSDYDEKAGVLEEKLGTDVYDIISKLKEIHDKAQVAEIMKNYQYLSFARVADYEKHKKDLKILKRVVKKYFEPTVYDKLFRSEENGTYSAYVNSFNSEEKSRRNYKERKQEDLYNSIKKLLKSVDNVDDTDIEYIKNEMDKENFLPKQLTFKNGVIPNQIHASELKAILKNAEKYLPFLNEKDESGYTVSERILMLFSFQIPYYVGPVSSNSNGWVKRLEPGQVLPWNIDKKIDLKETSEQFIQRMVRNCTYIAGEKVLPKASLLYENFKVLNEINNLSINGERITVNLKQDLYNTLFLKGKRVTRKQIFNYFHSRGLVEEDSQISGIDIAVNNSLSTYGKFLPLFGEHLKEDKYKKMVDDIVFWCTVYGDSRKFLREQLEEKYSDVLDENQIKRITGMKFKDWGNLSKEFLELSGCCKSTGEVMPLIRAMWETNYNLMELLHSEEFTYSEELEEKQGKIEKVLSEYTIDDLNEEYFSAPVKRMVWQTLLIIKEIEKIMKCPPTRIFVEMTRKDDEKGDNGRKSSRKDQLLALYKKIQSEDKEWKKEMSSRIEDYDKNGALRSKKLYLYFIQKGLDMYTGKPIDLDNLMSANSNYDIDHIYPRHFVKDDNINNNLVLASKPANAEKSDIYPIKDSIYQKMKYTWKVLRDEGLITEEKYKRLTGRNPFTDEQKAGFIARQLVETGQGTKGVADLLTALLPDTKLVYSKAGNVSDFRKRYDIPKSRLINDFHHAHDAYLNIVVGNIYFTKFTSNPLNYIRKECSSKDNKYQYNLGNMYKWDVKRDGKTAWVAPEEGETGTLATVKKMLSRNTPILTRLTIEGHGGIADATLYSHKKAKQDTYIPLKSSDARMADVTKYGGYSSVTTAYLFLVEHEIKGKKIRTLETVPIYLKDRLENSKEKLEEYCRETLGYTNPSVRMKKIKLQSLIKLNGYYMQISGRTGNRFTLRNYVQLCLNGKWVDYIHKLEKYQDKGVIDDLITDERNVELYNVLCEKHSVGIFTLRPNLVGDKIKNGYDKFVNLTTEEQIKLLIEIIKLTCVGIVSANLTLIGGAAISGKMLMSKNITYANECILINQSVTGLYENRIDLLGV

SEQ ID NO: 3092 - protein, 1358 aa, unidentified
  REGION 1..1358: note = Description of Unknown: uncultivated organism sequence
  REGION 1..1358: note = Category: MG91 effectors
  REGION 1..1358: note = Description: MG91-284 effector
MEKEYYLGLDMGTNSVGWAVTDDAYNLIRFKGKDMWGIREFDEANPAVERRTHRTSRRREQRNAVRMGLIRSYFADEIQKVDSNFYQRLDNSFFHVEDKQDNVKDKNGIFNDKNYKDADYYKQYPTIFHLRKELIEDDSQKDVRLVYLAVANMFKHRGHFLLSGIGSESSKQTITDLYNQVSGLITEEYGISLKTDIAGTDFEQVLCSREYSRTRKSEKVCEILEIKNSDKLKKAFVKSMCGLSVKITDIIDDTFTEISDEDKKITFSFVDSDYDEKAGVLEEKLGTDVYDIISKLKEIHDKAQVAEIMKNYQYLSFARVADYEKHKKDLKILKRVVKKHFEPTVYDKLFRSEENGTYSAYVNSFNSGEKSRRNYKERKQEDLYNSIKKLLKSVDNVYDTDIEYIKNEMDKENFLPKQLTFKNGVIPNQIHASELKAILKNAEKYLPFLNEKDESGYTVSERILMLFSFQIPYYVGPVSSNSNGWVKRLESGQVLPWNIDKKIDLKETSEQFIQRMVRNCTYIAGEKVLPKASLLYENFKVLNEINNLSINGERITVNLKQDLYNTLFLKGKRVTRKQIFNYFHSRGLVEEDSQISGIDIAVNNSLSTYGKFLPLFGEHLKEDKYKKMVDDIVFWCTVYGDSRKFLREQLEEKYSDVLDENQVKRITGMKFKDWGNLSKEFLELSGCCKSTGEVMPLIRAMWETNYNLMELLHSEEFTYSEELEEKQGKIEKVLSEYTIDDLNEEYFSAPVKRMVWQTLLIIKEIEKIMKCPPTRIFVEMTRKDDEKGDNGRKSSRKDQLLALYKKIQSEDKEWKKEMSSRIEDYDKKGALRSKKLYLYFIQKGLDMYTGKPIDLDNLMSANSNYDIDHIYPRHFVKDDNINNNLVLASKPANAEKSDIYPIKDSIYQKMKYTWKVLRDEGLITEEKYKRLTGRNPFTDEQKAGFIARQLVETGQGTKGVADLLTALLPDTKLVYSKAGNVSDFRKRYDIPKSRLINDFHHAHDAYLNIVVGNIYFTKFTSNPLNYIRKECSSKDNKYQYNLGNMYKWDVKRDGKTAWVAPEEGETGTLATVKKMLSRNTPILTRLTIEGHGGIADATLYSHKKAKQDTYIPLKSSDARMADVTKYGGYSSVTTAYLFLVEHEIKGKKIRTLETVPIYLKDRLENSKEKLEEYCRETLGYTNPSVRMKKIKLQSLIKLNGYYMQISGRTGNRFTLRNYVQLCLNGKWVDYIHKLEKYQDKGVIDDLITDERNVELYNVLCEKHSVGIFTLRPNLVGDKIKNGYDKFVNLTTEEQIKLLIEIIKLTCVGIVSANLTLIGGAAISGKMLMSKNITDANECILINQSVTGLYENRIDLLRV

SEQ ID NO: 3093 - protein, 1352 aa, unidentified
  REGION 1..1352: note = Description of Unknown: uncultivated organism sequence
  REGION 1..1352: note = Category: MG91 effectors
  REGION 1..1352: note = Description: MG91-285 effector
MTAFKYYLGLDMGTNSVGWAATDPEYRLLKAKGKDLWGIREFNEASGAVERRTHRISRRRRQREQVRIGILKDYFHDAICEVDPSFFRRLENSKYHEEDKDVEVRYKNNIFNDGNYTDKDYFNEYPTIYHLRNELISSTEKHDVRLVFLALLNMFKHRGHFLNAGLGENNGESNIDNAYFELTELLSELTEYHLSQDIDCKQIEAILSRRDMSRTHKAEELAGVLHVDLKNKPYKELIRGLCGLKFNACVVFPDVQSEEVTKLDICLSESTFDEKSDEIANIIGEDYFEIIMAMKEMFDIGSLASIMKGHNYLSQARVASYTKHKEDLKLLKEVIKKYCGKKEYDKFFNSDADGSYASYVGSYNSKNKERRVGNKRTSEELYKEIKKLLKDAQKEDENVQKILTSIENETFLPKQLTASNGVIPNQVHAREMKKILSNAENYLPFLTEKDETGLSVSERILKLFTFQIPYYVGPTSENSGKNGGNGWVVRREDGQVLPWNIDEKIDMKATSEAFISRMVRRCTYISGEQVLPKASLEYQSYCVLNEINNIKIDGERISVELKQDIYKAVFQKGKKVTKKQLCKYLYTRGIIETEEQVTGVDVSINSALTTYGKFKPIFGEDISKDSVQKMIEDIVFWCTVYGDSRKFLKARIEEKYGNKLSEEQIKRILGFKFKDWGNLSKKFLELNGADTSTGESISIIRALWNNNLNLMELINSSLYNYKECLAEYQNTMLKTLSEIEAEDLNEYYFSAPVRRMIWQTILVIKELVKVLGCEPERIFVEMTRKPDEHKTRTSSRRNKFEELYKKVKDETTDWMQVIANAEEDGKIRSKKMYLYLTQKGRCMYTGKHIELDDLFDNNLYDIDHIYPRHFVKDDNIDNNLVLVCKEKNAHKSDHYPIEEEIFLSQKKMWLELRKSGFITEEKYNRLMDRNPFSDEQKAGFIARQLVETSQGTKGVANILRQLLPGSKIVYAKASNVSEFRHTRDDIPKSRLVNDFHHAHDAYLNIVVGNVYYVKFTQNPLNFIKKDYDNYKEDYNLSKMFDWDVKRNGEVAWIAQRKDGEAGTITTVKKMLSRNTPLMTRYSFEGKGGLANETLYSAKKAKGEGYIPFKSSDDKMQDVTKYGGFTKVAGAYFFLVEHTEKKKRIRTIESVPVYLTRKIEQKPGELKKYCDEILGLVDADIRLKKIKIGSLIKRNGYFCYITGKTGNQLSVRNAVNLCLKNEWIKYISKLEKVKEKDTIDKIITKEKNEVLYSELIQKFKHCIFSKRPNPVGDKLEKGSEKFSNLSIKEQCAVLCQILQLAAVLGSECDMTLLGESAHCGKMLISKKIGDEEIYLINQSVTGLYEKKINLHTV

SEQ ID NO: 3094 - protein, 1358 aa, unidentified
  REGION 1..1358: note = Description of Unknown: uncultivated organism sequence
  REGION 1..1358: note = Category: MG91 effectors
  REGION 1..1358: note = Description: MG91-286 effector
MEKEYYLGLDMGTNSVGWAVTDDAYNLIRFKGKDMWGIREFDEANPAVERRTHRTSRRREQRNAVRMGLIRSYFADEIQKVDSNFYQRLDNSFFHVEDKQDNVKDKNGIFNDKNYKDADYYKQYPTIFHLRKELIEDASQKDVRLVYLAVANMFKHRGHFLLSGIGSESSKQTITDLYNQVSGLITEEYGISLKTDIAGTDFEQVLCSREYSRTRKSEKVCEILEIKNSDKLKKAFVKSMCGLSVKITDIIDDTFTEISDEDKKITFSFVDSDYDEKAGVLEEKLGTDVYDIISKLKEIHDKAQVAEIMKNYQYLSFARVADYEKHKKDLKILKRVVKKYFEPTVYDKLFRSEENGTYSAYVNSFNSEEKSRRNYKERKQEDLYNSIKKLLKSIDNVDDTDIEYIKNEMDKENFLPKQLTFKNGVIPNQIHASELKAILKNAEKYLPFLNEKDESGYTVSERILMLFSFQIPYYVGPVSSNSNGWVKRLEPGQVLPWNIDKKIDLKETSEQFIQRMVRNCTYIAGEKVLPKASLLYENFKVLNEINNLSINGERITVNLKQDLYNTLFLKGKRVTRKQIFNYFHSRGLVEEDSQISGIDITVNNSLSTYGKFLPLFGEHLKEDKYKKMVDDIVFWCTVYGDSRKFLREQLEEKYSDVLDENQIKRITGMKFKDWGNLSKEFLELSGCCKSTGEVMPLIRAMWETNYNLMELLHSEEFTYSEELEEKQGKIEKVLSEYTIDDLNEEYFSAPVKRMVWQTLLIIKEIEKIMKCPPTRIFVEMTRKDDEKGDNGRKSSRKDQLLALYKKIQSEDKEWKKEMSSRIEDYDKKGALRSKKLYLYFIQKGLDMYTGKPIDLDNLMSANSNYDIDHIYPRHFVKDDNINNNLVLASKPANAEKSDIYPIKDSIYQKMKYTWKVLRDEGLITEEKYKRLTGRNPFTDEQKAGFIARQLVETGQGTKGVADLLTALLPDTKLVYSKAGNVSDFRKKYDIPKSRLINDFHHAHDAYLNIVVGNIYFTKFTSNPLNYIRKECSSKDNKYQYNLGNMYKWDVKRDGKTAWIAAKEGETGTIATVKKMLSRNTPTLTRLTIEGHGGIADATLYSHKKAKQDAYIPLKSSDARMADVTKYGGYSSVTTAYLFLVEHEIKGKKIRTLETVPLYLKDRLENSKEKLEEYCRETLGYTNPSVRMKKIKLQSLIKLNGYYMQISGKTNKQFTVRNYVQFCLNSKWVDYIHKLEKYQDKGVIDDAITDEKNVELYNVLCEKHSVGIFTLRPNPVGDKIKKGYDKFVNLTTEEQIKLLIEIIKLTCVGIVSANLTLIGGASISGKMLISKNITDAKECLLINQSVTGLYENRIDLLRV

SEQ ID NO: 3095 - protein, 1358 aa, unidentified
  REGION 1..1358: note = Description of Unknown: uncultivated organism sequence
  REGION 1..1358: note = Category: MG91 effectors
  REGION 1..1358: note = Description: MG91-287 effector
MEKEYYLGLDMGTNSVGWAVTDDAYNLIRFKGKDMWGIREFDEANPAVERRTHRTSRRREQRNAVRMGLIRSYFADEIQKVDSNFYQRLDNSFFHVEDKQDNVKDKNGIFNDKNYKDADYYKQYPTIFHLRKELIEDASQKDVRLVYLAVANMFKHRGHFLLSGIGSESSKQTITDLYNQVSGLITEEYGISLKTDIAGTDFEQVLCSREYSRTRKSEKVCEILEIKNSDKLKKAFVKSMCGLSVKITDIIDDTFTEISDEDKKITFSFVDSDYDEKAGVLEEKLGTDVYDIISKLKEIHDKAQVAEIMKNYQYLSFARVADYEKHKKDLKILKRVVKKYFEPTVYDKLFRSEENGTYSAYVNSFNSEEKSRRNYKERKQEDLYNSIKKLLKSVDNVDDTDIEYIKNEMDKENFLPKQLTFKNGVIPNQIHASELKAILKNAEKYLPFLNEKDESGYTVSERILMLFSFQIPYYVGPVSSNSNGWVKRLEPGQVLPWNIDKKIDLKETSEQFIQRMVRNCTYIAGEKVLPKASLLYENFKVLNEINNLSINGERITVNLKQDLYNTLFLKGKRVTRKQIFNYFHSRGLVEEDSQISGIDIAVNNSLSTYGKFLPLFGEHLKEDKYKKMVDDIVFWCTVYGDSRKFLREQLEEKYSDVLDENQIKRITGMKFKDWGNLSKEFLELSGCCKSTGEVMPLIRAMWETNYNLMELLHSEEFTYSEELEEKQGKIEKVLSEYTIDDLNEEYFSAPVKRMVWQTLLIIKEIEKIMKCPPTRIFVEMTRKDDEKGDNGRKSSRKDQLLALYKKIQSEDKEWKKEMSSRIEDYDKNGALRSKKLYLYFIQKGLDMYTGKPIDLDNLMSANSNYDIDHIYPRHFVKDDNINNNLVLASKPANAEKSDIYPIKDSIYQKMKYTWKVLRDEGLITEEKYKRLTGRNPFTDEQKAGFIARQLVETGQGTKGVADLLTALLPDTKLVYSKAGNVSDFRKRYDIPKSRLINDFHHAHDAYLNIVVGNIYFTKFTSNPLNYIRKECSSKDNKYQYNLGNMYKWDVKRDGKTAWVAPEEGETGTLATVKKMLSRNTPILTRLTIEGHGGIADATLYSHKKAKQDTYIPLKSSDARMADVTKYGGYSSVTTAYLFLVEHEIKGKKIRTLETVPIYLKDRLENSKEKLEEYCRETLGYTNPSVRMKKIKLQSLIKLNGYYMQISGRTGNRFTLRNYVQLCLNGKWVDYIHKLEKYQDKGVIDDLITDERNVELYNVLCEKHSVGIFTLRPNLVGDKIKNGYDKFVNLTTEEQIKLLIEIIKLTCVGIVSANLTLIGGAAISGKMLMSKNITDANECILINQSVTGLYENRIDLLRV

SEQ ID NO: 3096 - protein, 1358 aa, unidentified
  REGION 1..1358: note = Description of Unknown: uncultivated organism sequence
  REGION 1..1358: note = Category: MG91 effectors
  REGION 1..1358: note = Description: MG91-288 effector
MEKEYYLGLDMGTNSVGWAVTDDAYNLIRFKGKDMWGIREFDEANPAVERRTHRTSRRREQRNAVRMGLIRSYFADEIQKVDSNFYQRLDNSFFYVEDKQDNVKDKNGIFNDKNYKDADYYKQYPTIFHLRKELIEDASQKDVRLVYLAVANMFKHRGHFLLSGIGSESSKQTITDLYNQVSGLITEEYGISLKTDIAGTDFEQVLCSREYSRTRKSEKVCEILEIKNSDKLKKAFVKSMCGLSVKITDIIDDTFTEISDEDKKITFSFVDSDYDEKAGVLEEKLGTDVYDIISKLKEIHDKAQVAEIMKNYQYLSFARVADYEKHKKDLKILKRVVKKYFEPTVYDKLFRSEENGTYSAYVNSFNSEEKSRRNYKERKQEDLYNSIKKLLKSVDNVDDTDIEYIKNEMDKENFLPKQLTFKNGVIPNQIHASELKAILKNAEKYLPFLNEKDESGYTVSERILMLFSFQIPYYVGPVSSNSNGWVKRLEPGQVLPWNIDKKIDLKETSEQFIQRMVRNCTYIAGEKVLPKDSLLYENFKVLNEINNLSINGERITVNLKQDLYNTLFLKGKRVTRKQIFNYFHSRGLVEEDSQISGIDIAVNNSLSTYGKFLPLFGEHLKEDKYKKMVDDIVFWCTVYGDSRKFLREQLEEKYSDVLDENQIKRITGMKFKDWGNLSKEFLELSGCCKSTGEVMPLIRAMWETNYNLMELLHSEEFTYSEELEEKQGKIEKVLSEYTIDDLNEEYFSAPVKRMVWQTLLIIKEIEKIMKCPPTRIFVEMTRKDDEKGDNGRKSSRKDQLLALYKKIQSEDKEWKKEMSSRIEDYDKKGALRSKKLYLYFIQKGLDMYTGKPIDLDNLMSANSNYDIDHIYPRHFVKDDNINNNLVLASKPANAEKSDIYPIKDSIYQKMKYTWKVLRDEGLITEEKYKRLTGRNPFTDEQKAGFIARQLVETGQGTKGVADLLTALLPDTKLVYSKAGNVSDFRKKYDIPKSRLINDFHHAHDAYLNIVVGNIYFTKFTSNPLNYIRKECSSKDNKYQYNLGNMYKWDVKRDGKTAWIAAKEGETGTIATVKKMLSRNTPTLTRLTIEGHGGIADATLYSHKKAKQDAYIPLKSSDARMADVTKYGGYSSVTTAYLFLVEHEIKGKKIRTLETVPLYLKDILENSKEKLEEYCRETLGYTNPSVRMKKIKLQSLIKLNGYYMQISGKTNKQFTVRNYVQFCLNSKWVDYIHKLEKYQDKGVIDDAITDEKNVELYNVLCEKHSVGIFTLRPNPVGDKIKKGYDKFVNLTTEEQIKLLIEIIKLTCVGIVSANLTLIGGASISGKMLISKNITDAKECLLINQSVTGLYENRIDLLRV

SEQ ID NO: 3097 - protein, 1358 aa, unidentified
  REGION 1..1358: note = Description of Unknown: uncultivated organism sequence
  REGION 1..1358: note = Category: MG91 effectors
  REGION 1..1358: note = Description: MG91-289 effector
MEKEYYLGLDMGTNSVGWAVTDDAYNLIRFKGKDMWGIREFDEANPAVERRTHRTSRRRKQRNAVRMGLIRSYFADEIQKVDSNFYQRLDNSFFHVEDKQDNVKDKNGIFNDKNYKDADYYKQYPTIFHLRKELIEDASQKDVRLVYLAVANMFKHRGHFLLSGIGSESSKQTITDLYNQVSGLITEEYGISLKTDIAGTDFEQVLCSREYSRTRKSEKVCEILEIKNSDKLKKAFVKSMCGLSVKITDIIDDTFTEISDEDKKITFSFVDSDYDEKAGVLEEKLGTDVYDIISKLKEIHDKAQVAEIMKNYQYLSFARVADYEKHKKDLKILKRVVKKYFEPTVYDKLFRSEENGTYSAYVNSFNSEEKSRRNYKERKQEDLYNSIKKLLKSVDNVDDTDIEYIKNEMDKENFLPKQLTFKNGVIPNQIHASELKAILKNAEKYLPFLNEKDELGYTVSERILMLFSFQIPYYVGPVSSNSNGWVKRLEPGQVLPWNIDKKIDLKETSEQFIQRMVRNCTYIAGEKVLPKASLLYENFKVLNEINNLSINGERITVNLKQDLYNTLFLKGKRVTRKQIFNYFHSRGLVEEDSQISGIDIAVNNSLSTYGKFLPLFGEHLKEDKYKKMVDDIVFWCTVYGDSRKFLREQLEEKYSDVLDENQIKRITGMKFKDWGNLSKEFLELSGCCKSTGEVMPLIRAMWETNYNLMELLHSEEFTYSEELEEKQGKIEKVLSEYTIDDLNEEYFSAPVKRMVWQTLLIIKEIEKIMKCPPTRIFVEMTRKDDEKGDNGRKSSRKDQLLALYKKIQSEDKEWKKEMSSRIEDYDKNGALRSKKLYLYFIQKGLDMYTGKPIDLDNLMSANSNYDIDHIYPRHFVKDDNINNNLVLASKPANAEKSDIYPIKDSIYQKMKYTWKVLRDEGLITEEKYKRLTGRNPFTDEQKAGFIARQLVETGQGTKGVADLLTALLPDTKLVYSKAGNVSDFRKRYDIPKSRLINDFHHAHDAYLNIVVGNIYFTKFTSNPLNYIRKECSSKDNKYQYNLGNMYKWDVKRDGKTAWVAPEEGETGTLATVKKMLSRNTPILTRLTIEGHGGIADATLYSHKKAKQDTYIPLKSSDARMADVTKYGGYSSVTTAYLFLVEHEIKGKKIRTLETVPIYLKDRLENSKEKLEEYCRETLGYTNPSVRMKKIKLQSLIKLNGYYMQISGRTGNRFTLRNYVQLCLNGKWVDYIHKLEKYQDKGVIDDLITDERNVELYNVLCEKHSVGIFTLRPNLVGDKIKNGYDKFVNLTTEEQIKLLIEIIKLTCVGIVSANLTLIGGAAISGKMLMSKNITYANECILINQSVTGLYENRIDLLRV

SEQ ID NO: 3098 - protein, 1358 aa, unidentified
  REGION 1..1358: note = Description of Unknown: uncultivated organism sequence
  REGION 1..1358: note = Category: MG91 effectors
  REGION 1..1358: note = Description: MG91-290 effector
MEKEYYLGLDMGTNSVGWAVTDDAYNLIRFKGKDMWGIREFDEANPAVERRTHRTSRRREQRNAVRMGLIRSYFADEIQKVDSNFYQRLDNSFFHVEDKQDNVKDKNGIFNDKNYKDADYYKQYPTIFHLRKELIEDASQKDVRLVYLAVANMFKHRGHFLLSGIGSESSKQTITDLYNQVSGLITEEYGISLKTDIAGTDFEQVLCSREYSRTRKSEKVCEILEIKNSDKLKKAFVKSMCGLSVKITDVIDDTFTEISDEDKKITFSFVDSDYDEKAGVLEEKLGTDVYDIISKLKEIHDKAQVAEIMKNYQYLSFARVADYEKHKKDLKILKRVVKKYFEPTVYDKLFRSGENGTYSAYVNSFNSGEKSRRNYKERKQEDLYNSIKKLIKSIDNVCDTDIEYIKNEIEKENFLPKQLTFKNGVIPNQIHASELKAILKNAEKYLPFLNEKDESGYTVSERILMLFSFQIPYYVGPVSPNSNGWVKRLEPGQVLPWNIDKKIDLKETSEQFIQRMVRNCTYIAGEKVLPKASLLYENFKVLNEINNLSINGERIAVALKQDLYNTLFLKGKRVTRKQIFNYFHSRGLVEEDSQISGIDIAVNNSLSTYGKFLPLFGEHLKEDKYKKMVDDIVFWCTVYGDSRKFLREQIEEKYSDVLDENQIKRITGMKFKDWGNLSKEFLELSGCCKSTGEMIPLIRAMWETNYNLMELLHSEEFTYSEELEEKQGKIEKVLSEYTIDDLNEEYFSAPVKRMVWQTLLIIKEIEKIMKCPPTRIFVEMTRKDDEKGDNGRKSSRKDQLLALYKKIQSEDKEWKKEMSSRIEDYDKNGALRSKKLYLYFIQKGLDMYTGKPIDLDNLMSANSNYDIDHIYPRHFVKDDNINNNLVLASKPANAEKSDIYPIKDSIYQKMKYTWKVLRDEGLITEEKYKRLTGRNPFTDEQKAGFIARQLVETGQGTKGVADLLTALLPDTKLVYSKAGNVSDFRKRYDIPKSRLINDFHHAHDAYLNIVVGNIYFTKFTSNPLNYIRKECSSKDNKYQYNLGNMYKWDVKRDGKTAWIAAKEGETGTIATVKKILSRNTPTLTRLTIEGHGGIADATLYSHKKAKQDAYIPLKSSDARMADVTKYGGYSSVTTAYLFLVEHEIKGKKIRTLETVPLYLKDRLENSKEKLEEYCRESLGYTNPSVRMKKIKLQSLIKLNGYYMQISGKSIKQFEVRNYVQICLNGKWVDYIHKLEKYQDKGVIDNAITDEKNVELYNILCEKHSVGIFTLRPNPVGDKIKKGYDKFVNLTTEEQIKLLIEIIKLTCVGIVKADLRLIGASEKSGTMKINKNITDAKECFLINQSVTGLYENRIDLLRV

SEQ ID NO: 3099 - protein, 1352 aa, unidentified
  REGION 1..1352: note = Description of Unknown: uncultivated organism sequence
  REGION 1..1352: note = Category: MG91 effectors
  REGION 1..1352: note = Description: MG91-291 effector
MTAFKYYLGLDMGTNSVGWAATDPEYRLLKAKGKDLWGIREFNEASGAVERRTHRISRRRRQREQVRIGILKDYFHDAICEVDPGFFQRLENSKYHEEDKDVEVRYKNNIFNDSNYTDKDYFNEYPTIYHLRNELISSTEKHDVRLVFLALLNMFKHRGHFLNAGLGENNGESNIDNAYFELTELLSELTEYHLSQDIDCKQIEAILSRRDMSRTHKAEELAGVLHVDLKNKPYKELIRGLCGLKFNACVVFPDVQSEEVTKLDICLSESTFDEKSDEIANIIGEDYFEIIMAMKEMFDIGSLASIMKGHNYLSQARVASYTKHKEDLKLLKEVIKKYCGKKEYDKFFNSDADGSYASYVGSYNSKNKERRVGNKRTSEELYKEIKKLLKDAQKEDENVQKILTSIENETFLPKQLTASNGVIPNQVHAREMKKILSNAENYLPFLTEKDETGLSVSERILKLFTFQIPYYVGPTSENSGKNGGNGWVVRREDGQVLPWNIDEKIDMKATSEAFISRMVRRCTYISGEQVLPKASLEYQSYCVLNEINNIKIDGERISVELKQDIYKAVFQKGKKVTKKQLCKYLHTRGIIETEEQVTGVDVSINNALTTYGKFKPIFGEDISKDSVQKMIEDIVFWCTVYGDSKKFLKDRIEEKYGNKLSEEQIKRILGFKFKDWGNLSKKFLELNGADTSTGESISIIRALWNNNLNLMELINSSLYNYKECLAEYQNTMMKTLSEIEAEDLNEYYFSAPVRRMIWQTILVIKELVKVLGCEPERIFVEMTRKPDEHKTRTSSRRNKFEELYKKVKDETTDWMQVIANAEEDGKIRSKKMYLYLTQKGRCMYTGKHIELDDLFDNNLYDIDHIYPRHFVKDDNIDNNLVLVCKEKNAHKSDHYPIEEEIFLSQKKMWLELRKSGFITEEKYNRLMDRNPFSDEQKAGFIARQLVETSQGTKGVANILRQLLPGSKIVYAKASNVSEFRCTRDDIQKSRLVNDFHHAHDAYLNIVVGNVYYVKFTQNPLNFIKKDYDKYKEDYNLSKMFDWDVKRNGEVAWIAQRKDGAAGTITTVKRMLSRNTPLMTRYSFDGKGGLTNETLYSAKKAKGEGYIPFKSSDDKMQDVTKYGGFTSVTGAYFFLVEHTEKKKRIRTIESVPVYLAQKIEQNPDELKKYCEEILGLIDADIRLKKIKIGSLIKRNGYFCYITGKTVNRLIVRNAVNLCLKNEWIKYISKLEKVKEKDAVDKIITKEKNEVLYSELIQKFKHGIFSKRPNPVGDKLEKDSEKFNNLSIKDQCAVLCQVLRMAAILGSECDMTLLGDSPNCGKMLISKKIGDEEIYLINQSVTGLYEKKINLHTV

SEQ ID NO: 3100 - protein, 1358 aa, unidentified
  REGION 1..1358: note = Description of Unknown: uncultivated organism sequence
  REGION 1..1358: note = Category: MG91 effectors
  REGION 1..1358: note = Description: MG91-292 effector
MEKEYYLGLDMGTNSVGWAVTDDAYNLIRFKGKDMWGIREFDEANPAVERRTHRTSRRRKQRNAVRMGLIRSYFADEIQKVDSNFYQRLDNSFFHVEDKQDNVKDKNGIFNDKNYKDADYYKQYPTIFHLRKELIEDASQKDVRLVYLAVANMFKHRGHFLLSGIGSESSKQTITDLYNQVSGLITEEYGISLKTDIAGTDFEQVLCSREYSRTRKSEKVCEILEIKNSDKLKKAFVKSMCGLSVKITDIIDDTFTEISDEDKKITFSFVDSDYDEKAGVLEEKLGTDVYDIISKLKEIHDKAQVAEIMKNYQYLSFARVADYEKHKKDLKILKRVVKKYFEPTVYDKLFRSEENGTYSAYVNSFNSEEKSRRNYKERKQEDLYNSIKKLLKSVDNVDDTDIEYIKNEMDKENFLPKQLTFKNGVIPNQIHASELKAILKNAEKYLPFLNEKDESGYTVSERILMLFSFQIPYYVGPVSSNSNGWVKRLEPGQVLPWNIDKKIDLKETSEQFIQRMVRNCTYIAGEKVLPKASLLYENFKVLNEINNLSINGERITVNLKQDLYNTLFLKGKRVTRKQIFNYFHSRGLVEEDSQISGIDIAVNNSLSTYGKFLPLFGEHLKEDKYKKMVDDIVFWCTVYGDSRKFLREQLEEKYSDVLDENQIKRITGMKFKDWGNLSKEFLELSGCCKSTGEVMPLIRAMWETNYNLMELLHSEEFTYSEELEEKQGEIEKVLSEYTIDDLNEEYFSAPVKRMVWQTLLIIKEIEKIMKCPPTRIFVEMTRKDDEKGDNGRKSSRKDQLLALYKKIQSEDKEWKKEMSSRIEDYDKNGALRSKKLYLYFIQKGLDMYTGKPIDLDNLMSANSNYDIDHIYPRHFVKDDNINNNLVLASKPANAEKSDIYPIKDSIYQKMKYTWKVLRDEGLITEEKYKRLTGRNPFTDEQKAGFIARQLVETGQGTKGVADLLTALLPDTKLVYSKAGNVSDFRKKYDIPKSRLINDFHHAHDAYLNIVVGNIYFTKFTSNPLNYIRKECSSKDNKYQYNLGNMYKWDVKRDGKTAWIAAKEGETGTIATVKKMLSRNTPTLTRLTIEGHGGIADATLYSHKKAKQDAYIPLKSSDARMADVTKYGGYSSITTAYLFLVEHEIKGKKIRTLETVPLYLKDRLENSKEKLEEYCRETLGYTNPSVRMKKIKLQSLIKLNGYYMQISGKTNKQFTVRNYVQFCLNSKWVDYIHKLEKYQDKGVIDDAITDEKNVELYNVLCEKHSVGIFTLRPNPVGDKIKKGYDKFVNLTTEEQIKLLIEIIKLTCVGIVSANLTLIGGASISGKMLISKNITDAKECLLINQSVTGLYENRIDLLRV

SEQ ID NO: 3101 - protein, 1352 aa, unidentified
  REGION 1..1352: note = Description of Unknown: uncultivated organism sequence
  REGION 1..1352: note = Category: MG91 effectors
  REGION 1..1352: note = Description: MG91-293 effector
MTAFKYYLGLDMGTNSVGWAATDPEYRLLKAKGKDLWGIREFNEASGAVERRTHRISRRRRQREQVRIGILKDYFHDAICEVDPSFFQRLENSKYHEEDKDVEVRYKNNIFNDSNYTDKDYFNEYPTIYHLRNELISSTEKHDVRLVFLALLNMFKHRGHFLNAGLGENNGESNIDNAYFELTELLSELTEYHLSQDIDCKQIEAILSRRDMSRTHKAEELAGVLHVDLKNKPYKELIRGLCGLKFNACVVFPDVQSEEVTKLDICLSESTFDEKSDEIANIIGEDYFEIIMAMKEMFDIGSLASIMKGHNYLSQARVASYTKHKEDLKLLKEVIKKYCGKKEYDKFFNSDADGSYASYVGSYNSKKKERRVGNKRTSEELYKEIKKLLKDAQKEDENVQKILTSIENETFLPKQLTASNGVIQNQVHAREMKKILSNAENYLPFLTKKDETGLSVSERILKLFTFQIPYYIGPTSENSGKNGGNGWVVRREDGQVLPWNIDEKIDMKATSEAFISRMVRRCTYISGEQVLPKASLEYQSYCVLNEINNIKIDGERISVELKQDIYKAVFQKGKKVTKKQLCKYLHTRGIIETEEQVTGVDVSINNALTTYGKFKPIFGEDISKDSVQKMIEDIVFWCTVYGDSKKFLKDRIEEKYGNKLSEEQIKRILGFKFKDWGNLSKKFLELNGADTSTGESISIIRALWNNNLNLMELINSSLYNYKECLAEYQNTMLKTLSEIEAEDLNEYYFSAPVRRMIWQTILVIKELVKVLGCEPERIFVEMTRKPDEHKTRTSSRRNKFEELYKKVKDETTDWMQVIANAEEDGKIRSKKMYLYLTQKGRCMYTGKHIELDDLFDNNLYDIDHIYPRHFVKDDNIDNNLVLVCKEKNAHKSDHYPIEEEIFLSQKKMWLELRKSGFITEEKYNRLMDRNPFSDEQKAGFIARQLVETSQGTKGVANILRQLLPGSKIVYAKASNVSEFRHTRDDIPKSRLVNDFHHAHDAYLNIVVGNVYYVKFTQNPLNFIKKDYDKYKEDYNLSKMFDWDVKRNGEVAWIAQRKDGEAGTITTVKKMLSRNTPLMTRYSFEGKGGLANETLYSAKKAKGEGYIPFKSSDDKMQDVTKYGGFTSVTGAYFFLVEHTEKKKRIRTIESVPVYLAQKIEQNPDELKKYCEEILGLIDADIRLKKIKIGSLIKRNGYFCYITGKTGKQLIVRNAVNLCLKNEWIKYISKLEKVKEIDAVDKIITKEKNEVLYSELIQKFKHGIFSKRPNPVGDKLEKGSEKFSNLSIKEQCAVLCQILQLAAVLGSECDMTLLGESAHCGKMLISKKIGDEEIYLINQSVTGLYEKKINLHTV

SEQ ID NO: 3102 - protein, 1352 aa, unidentified
  REGION 1..1352: note = Description of Unknown: uncultivated organism sequence
  REGION 1..1352: note = Category: MG91 effectors
  REGION 1..1352: note = Description: MG91-294 effector
MTAFKYYLGLDMGTNSVGWAATDPEYRLLKAKGKDLWGIREFNEASGAVERRTHRISRRRRQREQVRIGILKDYFHDAICEVDPGFFRRLENSKYHEEDKDVEVRYKNNIFNDSNYTDKDYFNEYPTIYHLRNELISSTEKHDVRLVFLALLNMFKHRGHFLNAGLGENNGESNIDNAYFELTELLSELTEYHLSHDIDCKQIEAILSRRDMSRTHKVEELAGVLHVDLKNKPYKELIRGLCGLKFNACVVFPDVQSEEVTKLDICLSESSFDEKSDEIANIIGEDYFEIIMAMKEMFDIGSLASIMKGHNYLSQARVASYTKHKEDLKLLKEVIKKYCGKKEYDKFFNSDADGSYASYVGSYNSKNKERRVGNKRTSEELYKEIKKLLKDAPKEDENVQKILTSIENETFLPKQLTASNGVIPNQVHAREMKKILSNAENYLPFLTENDETGLSVSERILKLFTFQIPYYVGPTSENSGKNGGNGWVVRREDGQVLPWNIDEKIDMKATSEAFISRMVRRCTYISGEQVLPKASLEYQSYCVLNEINNIKIDGERISVELKQDIYKAVFQKGKKVTKKQLCKYLHTRGIIETEEQVTGVDVSINNALTTYGKFKPIFGEDISKDSVQKMIEDIVFWCTVYGDSKKFLKDRIEEKYGNKLSEEQIKRILGFKFKDWGNLSKKFLELNGADTSTGESISIIRALWNNNLNLMELINSSLYNYKECLAEYQNTMLKTLSEIEAEDLNEYYFSAPVRRMIWQTILVIKELVKVLGCEPERIFVEMTRRPDEHKTRTSSRRNKFEELYKKVKDEATDWMQVIAKAEEDGKIRSKKMYLYLTQKGRCMYTGKHIELDDLFDKNLYDIDHIYPRHFVKDDNIDNNLVLVCKEKNAHKSDHYPIEEEIFLSQKKMWLELRKSGFITEEKYNRLMGRSPFSDEQKAGFIARQLVETSQGTKGVANILRQLLPGSKIVYAKASNVSEFRHTRDDIPKSRLVNDFHHAHDAYLNIVVGNVYYVKFTQNPLNFIKKDYDKYKEDYNLSKMFDWDVKRNGEVAWIAQRKDGEAGTITTVKRMLSRNTPLMTRYSFEGKGGLANETLCSAKKAKGEGYIPFKSSDDKMQDVTKYGGFTKVTGAYFFLVEHTEKKKRIRTIESVPVYLAQKIEQNPDELKKYCEEILGLVDADIRLKKIKIGSLIKRNGYFCYITGKTGNRLSVRNAVNLCLKNEWIKYISKLEKVKEKDAVDEIITKEKNEVLYSELIQKFKHGIFSKRPNPVEDKLEKGSEKFSNLSIKEQCAVLCQILQLAAVLGSECDMTLLGESAHCGKMLISKKIGDEEIYLLNQSVTGLYEKKINLHTV

SEQ ID NO: 3103 - protein, 1353 aa, unidentified
  REGION 1..1353: note = Description of Unknown: uncultivated organism sequence
  REGION 1..1353: note = Category: MG91 effectors
  REGION 1..1353: note = Description: MG91-295 effector
MAAYYLGLDMGTSSVGWAVTNEQYELIKKKGKDLWGIREFDEAHTAVDRRMMRVSRRRRQRELARIGLLKEYFQDAIAEVDPNFYARLENSKYHLEDKDVSVRTYNGIFADKDYTDKEYFAEYPTIFHLRKELLESQEPHDVRLVYLALVNMFKHRGHFLNATLSSDSENRSIKDVWNEFAEQVYELLGISFSDEIDYMALQEIMCSTDISRKKKAEELVQLLKIDKKEKQKIALLECVIGLNVSIKTIFGACISDDFDPKMKISFSDAGYEEKIVDIQEVLGDENFELIAGMKALYDAAILNQIMGGNAYLSIARVQEYEKHKSDLKILKSIYRKYATKKDYDDMFRSTEKGSYSAYTNSTNSDKVANAENGGEPVRRGIEGRKKEDLYANIKKKLAEMPEDEDVQYVLNEIEKDHFLPKQLTASNGVIPNQIHLKEMKKILSNAENYLPFLKEKDESGYTTTERILKLFSFQIPYYVGPVTEKSARDGGNGWVIRKEDGVVLPWNINEKIDMKKTSEAFISRMVRRCTYMSGEQVLPKASLEYESFCVLNELNNLKVRGEKLPVEIKQNMYKDLFETGKRVTKNKIIKYLIGQGVLSEGNEDELTGLMDGINGTLSSFAKFRAVFGDAIYEDSCKKMVEQIIFWCTVYGDSKSFLKEQLEEKYAKDLTPEQMKRILGFKFKDWGNLSKEFLELNGCKKDTGEAASLIRMLWETNDNLMELLAKDKYTYQEKLQESQEKSYKILSEMQPEDLEDYYFSAPVKRMVWQTLLVIKEIEKVMGEPPKRLFVEMTRSENKKEGMKNSRAKKFLDLYKKIKDEDKDWKKIIESADEDGRIRSKKMYLYLTQKGRCMYTGRPIDLDQLFNNNLYDIDHIYPRHFVKDDNLENNLVLVEKEKNARKSDTYPLDEEIYKKQLNWWRELHQQNLINDEKFKRLTGRNPFSDEQKAGFIARQLVETSQGTKGVATILKEVFPEETTIVYAKARNVSDFRHDYDLLKSRIVNDFHHAQDAYLNIVVGNVYYVKFTQNPMNFIRENKSYNLGKMFAWDVKRGNETAWIAKPENGSAATIATVRKVMAKNTPLLTRLSFEGGGGIANQTLYSAKKAKEEGYIPLKSSDPKMQDIKKYGGYTSVTTAYFILVEHGTEKKRIRTIESVTLIWKDRIEKNPDELQVYCEEVLGLINPDIRVRKILIQSLIKREGYYMHISGKTGNQIKLRNAVSLCLKTTWTNYIKKLEKGEKTEEITKASNIALYEELMRKHKETIYAKRPNPVGDKLLSGEEKFEKMEVEIQIKVLLEILKLTQIGLPTADLREIGESANTGVMLMSKNITKLQEIKLIHQSVTGIYEQQVDLLTV

SEQ ID NO: 3104 - protein, 1352 aa, unidentified
  REGION 1..1352: note = Description of Unknown: uncultivated organism sequence
  REGION 1..1352: note = Category: MG91 effectors
  REGION 1..1352: note = Description: MG91-296 effector
MTAFKYYLGLDMGTNSVGWAATDPEYRLLKAKGKDLWGIREFNEASGAVERRTHRISRRRRQREQVRIGILKDYFHDAICEVDPGFFQRLENSKYHEEDKDVEVRYKNNIFNDSNYTDKDYFNEYPTIYHLRNELISSTEKHDVRLVFLALLNMFKHRGHFLNAGLGENNGESNIDNAYFELTELLSELTEYHLSQDIDCKQIEAILSRRDMSRTHKAEELAGVLHVDLKNKPYKELIRGLCGLKFNACVVFPDVQSEEVTKLDICLSESTFDEKSDEIANIIGEDYFEIIMAMKEMFDIGSLASIMKGHNYLSQARVASYTKHKEDLKLLKEVIKKYCGKKEYDKFFNSDADGSYASYVGSYNSKNKERRVGNKRTSEELYKEIKKLLKDAQKEDENVQKILTSIENETFLPKQLTASNGVIPNQVHAREMKKILSNAENYLPFLTEKDETGLSVSERILKLFTFQIPYYVGPTSENSGKNGGNGWVVRREDGQVLPWNIDEKIDMKATSEAFISRMVRRCTYISGEQVLPKASLEYQSYCVLNEINNIKIDGERISVELKQDIYKAVFQKGKKVTKKQFCKYLHTRGIIETEEQVTGVDVSINNALTTYGKFKPIFGEDISKDSVQKMIEDIVFWCTVYGDSKKFLKDRIEEKYGNKLSEEQIKRILGFKFKDWGNLSKKFLELNGADTSTGESISIIRALWNNNLNLMELINSSLYNYKECLAEYQNTMLKTLSEIEAEDLNEYYFSAPVRRMIWQTILVIKELVKVLGCEPERIFVEMTRKPDEHKTRTSSRRNKFEELYKKVKDETTDWMQVIANAEEDGKIRSKKMYLYLTQKGRCMYTGKHIELDDLFDNNLYDIDHIYPRHFVKDDNIDNNLVLVCKEKNAHKSDHYPIEEEIFLSQKKMWLELRKSGFITEEKYNRLMDRNPFSDEQKAGFIARQLVETSQGTKGVANILRQLLPGSKIVYAKASNVSEFRCTRDDIQKSRLVNDFHHAHDAYLNIVVGNVYYVKFTQNPLNFIKKDYDKYKEDYNLSKMFDWDVKRNGEVAWIAQRKDGAAGTITTVKRMLSRNTPLMTRYSFDGKGGLTNETLYSAKKAKGEGYIPFKSSDDKMQDVTKYGGFTSVTGAYFFLVEHTEKKKRIRTIESVPVYLAQKIEQNPDELKKYCEEILGLIDADIRLKKIKIGSLIKRNGYFCYITGKTVNRLIVRNAVNLCLKNEWIKYISKLEKVKEKDAVDKIITKEKNEVLYSELIQKFKHGIFSKRPNPVGDKLEKDSEKFNNLSIKDQCAVLCQVLRMAAILGSECDMTLLGDSPNCGKMLISKKIGDEEIYLINQSVTGLYEKKINLHTV

SEQ ID NO: 3105 - protein, 1274 aa, unidentified
  REGION 1..1274: note = Description of Unknown: uncultivated organism sequence
  REGION 1..1274: note = Category: MG91 effectors
  REGION 1..1274: note = Description: MG91-297 effector
MEKEYYLGLDMGTNSVGWAVTDDAYNLIRFKGKDMWGIREFDEANPAVERRTHRTSRRREQRNAVRMGLIRSYFADEIQKVDSNFYQRLDNSFFHVEDKQDNVKDKNGIFNDKNYKDADYYKQYPTIFHLRKELIEDASQKDVRLVYLAVANMFKHRGHFLLSGIGSESSKQTITDLYNQVSGLITEEYGISLKTDIAGTDFEQVLCSREYSRTRKSEKVCEILEIKNSDKLKKAFVKSMCGLSVKITDIIDDTFTEISDEDKKITFSFVDSDYDEKAGVLEEKLGTDVYDIISKLKEIHDKAQVAEIMKNYQYLSFARVADYEKHKKDLKILKRVVKKYFEPTVYDKLFRSEENGTYSAYVNSFNSEEKSRRNYKERKQEDLYNSIKKLLKSVDNVDDTDIEYIKNEMDKENFLPKQLTFKNGVIPNQIHASELKAILKNAEKYLPFLNEKDESGYTVSERILMLFSFQIPYYVGPVSSNSNGWVKRLEPGQVLPWNIDKKIDLKETSEQFIQRMVRNCTYIAGEKVLPKASLLYENFKVLNEINNLSINGERITVNLKQDLYNTLFLKGKRVTRKQIFNYFHSRGLVEEDSQISGIDIAVNNSLSTYGKFLPLFGEHLKEDKYKKMVDDIVFWCTVYGDSRKFLREQLEEKYSDVLDENQIKRITGMKFKDWGNLSKEFLELSGCCKSTGEVMPLIRAMWETNYNLMELLHSEEFTYSEELEEKQGKIEKVLSEYTIDDLNEEYFSAPVKRMVWQTLLIIKEIEKIMKCPPTRIFVEMTRKDDEKGDNGRKSSRKDQLLALYKKIQSEDKEWKKEMSSRIEDYDKNGALRSKKLYLYFIQKGLDMYTGKPIDLDNLMSANSNYDIDHIYPRHFVKDDNINNNLVLASKPANAEKSDIYPIKDSIYQKMKYTWKVLRDEGLITEEKYKRLTGRNPFTDEQKAGFIARQLVETGQGTKGVADLLTALLPDTKLVYSKAGNVSDFRKRYDIPKSRLINDFHHAHDAYLNIVVGNIYFTKFTSNPLNYIRKECSSKDNKYQYNLGNMYKWDVKRDGKTAWVAPEEGETGTLATVKKMLSRNTPILTRLTIEGHGGIADATLYSHKKAKQDTYIPLKSSDARMADVTKYGGYSSVTTAYLFLVEHEIKGKKIRTLETVPLYLKDRLENSKEKLEEYCRETLGYTNPSVRMKKIKLQSLIKLNGYYMQISGKTNKQFTVRNYVQFCLNSKWVDYIHKLEKYQDKGVIDDAITDEKMWNCIMFYAKNIVWAYLHYVRIR

SEQ ID NO: 3106 - protein, 1352 aa, unidentified
  REGION 1..1352: note = Description of Unknown: uncultivated organism sequence
  REGION 1..1352: note = Category: MG91 effectors
  REGION 1..1352: note = Description: MG91-298 effector
MTAFKYYLGLDMGTNSVGWAATDPEYRLLKAKGKDLWGIREFNEASGAVERRTHRISRRRRQREQVRIGILKDYFHDAICEVDPGFFQRLENSKYHEEDKDVEVRYKNNIFNDSNYTDKDYFNEYPTIYHLRNELISSTEKHDVRLVFLALLNMFKHRGHFLNAGLGENNGESNIDNAYFELTELLSELTEYHLSQDIDCKQIEAILSRRDMSRTHKAEELAGVLHVDLKNKPYKELIRGLCGLKFNACVVFPDVQSEEVTKLDICLSESTFDEKSDEIANIIGEDYFEIIMAMKEMFDIGSLASIMKGHNYLSQARVASYTKHKEDLKLLKEVIKKYCGKKEYDKFFNSDADGSYASYVGSYNSKNKERRVGNKRTSEELYKEIKKLLKDAQKEDENVQKILTSIENETFLPKQLTASNGVIPNQVHAREMKKILSNAENYLPFLTEKDETGLSVSERILKLFTFQIPYYVGPTSENSGKNGGNGWVVRREDGQVLPWNIDEKIDMKATSEAFISRMVRRCTYISGEQVLPKASLEYQSYCVLNEINNIKIDGERISVELKQDIYKAVFQKGKKVTKKQLCKYLHTRGIIETEEQVTGVDVSINNALTTYGKFKPIFGEDISKDSVQKMIEDIVFWCTVYGDSKKFLKDRIEEKYGNKLSEEQIKRILGFKFKDWGNLSKKFLELNGADTSTGESISIIRALWNNNLNLMELINSSLYNYKECLAEYQNTMLKTLSEIEAEDLNEYYFSAPVRRMIWQTILVIKELVKVLGCEPERIFVEMTRKPDEHKTRTSSRRNKFEELYKKVKDETTDWMQVIANAEEDGKIRSKKMYLYLTQKGRCMYTGKHIELDDLFDNNLYDIDHIYPRHFVKDDNIDNNLVLVCKEKNAHKSDHYPIEEEIFLSQKKMWLELRKSGFITEEKYNRLMDRNPFSDEQKAGFIARQLVETSQGTKGVANILRQLLPGSKIVYAKASNVSEFRCTRDDIQKSRLVNDFHHAHDAYLNIVVGNVYYVKFTQNPLNFIKKDYDKYKEDYNLSKMFDWDVKRNGEVAWIAQRKDGAAGTITTVKRMLSRNTPLMTRYSFDGKGGLTNETLYSAKKAKGEGYIPFKSSDDKMQDVTKYGGFTSVTGAYFFLVEHTEKKKRIRTIESVPVYLAQKIEQNPDELKKYCEEILGLIDADIRLKKIKIGSLIKRNGYFCYITGKTVNRLIVRNAVNLCLKNEWIKYISKLEKIKEKDAVDKIITKEKNEVLYSELIQKFKHGIFSKRPNPVGDKLEKDSEKFNNLSIKDQCAVLCQVLRMAAILGSECDMTLLGDSPNCGKMLISKKIGDEEIYLINQSVTGLYEKKINLHTV

SEQ ID NO: 3107 - protein, 1352 aa, unidentified
  REGION 1..1352: note = Description of Unknown: uncultivated organism sequence
  REGION 1..1352: note = Category: MG91 effectors
  REGION 1..1352: note = Description: MG91-299 effector
MTAFKYYLGLDMGTNSVGWAATDPEYRLLKAKGKDLWGIREFNEASGAVERRTHRISRRRRQREQVRIGILKDYFHDAICEVDPGFFQRLENSKYHEEDKDVEVRYKNNIFNDSNYTDKDYFNEYPTIYHLRNELISSTEKHDVRLVFLALLNMFKHRGHFLNAGLGENNGESNIDNAYFELTELLSELTEYHLSQDIDCKQIEAFLSRRDMSRTHKAEELAGVLHVDLKNKPYKELIRGLCGLKFNACVVFPDVQSEEVTKLDICLSESTFDEKSDEIANIIGEDYFEIIMAMKEMFDIGSLASIMKGHNYLSQARVASYTKHKEDLKLLKEVIKKYCGKKEYDKFFNSDADGSYASYVGSYNSKNKERRVGNKRTSEELYKEIKKLLKDAQKEDENVQKILTSIENETFLPKQLTASNGVIPNQVHAREMKKILSNAENYLPFLTEKDETGLSVSERILKLFTFQIPYYVGPTSENSGKNGGNGWVVRREDGQVLPWNIDEKIDMKATSEAFISRMVRRCTYISGEQVLPKASLEYQSYCVLNEINNIKIDGERISVELKQDIYKAVFQKGKKVTKKQLCKYLHTRGIIETEEQVTGVDVSINNALTTYGKFKPIFGEDISKDSVQKMIEDIVFWCTVYGDSKKFLKDRIEEKYGNKLSEEQIKRILGFKFKDWGNLSKKFLELNGADTSTGESISIIRALWNNNLNLMELINSSLYNYKECLAEYQNTMLKTLSEIEAEDLNEYYFSAPVRRMIWQTILVIKELVKVLGCEPERIFVEMTRKPDEHKTRTSSRRNKFEELYKKVKDETTDWMQVIANAEEDGKIRSKKMYLYLTQKGRCMYTGKHIELDDLFDNNLYDIDHIYPRHFVKDDNIDNNLVLVCKEKNAHKSDHYPIEEEIFLSQKKMWLELRKSGFITEEKYNRLMDRNPFSDEQKAGFIARQLVETSQGTKGVANILRQLLPGSKIVYAKASNVSEFRCTRDDIQKSRLVNDFHHAHDAYLNIVVGNVYYVKFTQNPLNFIKKDYDKYKEDYNLSKMFDWDVKRNGEVAWIAQRKDGAAGTITTVKRMLSRNTPLMTRYSFDGKGGLTNETLYSAKKAKGEGYIPFKSSDDKMQDVTKYGGFTSVTGAYFFLVEHTEKKKRIRTIESVPVYLAQKIEQNPDELKKYCEEILGLIDADIRLKKIKIGSLIKRNGYFCYITGKTVNRLIVRNAVNLCLKNEWIKYISKLEKVKEKDAVDKIITKEKNEVLYSELIQKFKHGIFSKRPNPVGDKLEKDSEKFNNLSIKDQCAVLCQVLRMAAILGSECDMTLLGDSPNCGKMLISKKIGDEEIYLINQSVTGLYEKKINLHTV

SEQ ID NO: 3108 - protein, 1352 aa, unidentified
  REGION 1..1352: note = Description of Unknown: uncultivated organism sequence
  REGION 1..1352: note = Category: MG91 effectors
  REGION 1..1352: note = Description: MG91-300 effector
MTAFKYYLGLDMGTNSVGWAATDPGYRLLKAKGKDLWGIREFNEASGAVERRTHRISRRRRQREQVRIGILKDYFHDAICEVDPSFFQRLENSKYHEEDKDVEVRYKNNIFNDSNYTDKDYFNEYPTIYHLRNELISSTEKHDVRLVFLALLNMFKHRGHFLNAGLGENNGESNIDNAYFELTELLSELTEYHLSQDIDCKQIEAILSRRDMSRTHKAEELAGVLHVDLKNKPYKELIRGLCGLKFNACVVFPDVQSEEVTKLDICLSESTFDEKSDEIANIIGEDYFEIIMAMKEMFDIGSLASIMKGHNYLSQARVASYTKHKEDLKLLKEVIKKYCGKKEYDKFFNSDADGSYASYVGSYNSKNKERRVGNKRTSEELYKEIKKLLKDAQKEDENVQKILTSIENETFLPKQLTASNGVIPNQVHAREMKKILSNAENYLPFLTEKDETGLSVSERILKLFTFQIPYYVGPTSENSGKNGGNGWVVRREDGQVLPWNIDEKIDMKATSEAFISRMVRRCTYISGEQVLPKASLEYQSYCVLNEINNIKIDGERISVELKQDIYKAVFQKGKKVTKKQLCKYLHTRGIIETEEQVTGVDVSINNALTTYGKFKPIFGEDISKDSVQKMIEDIVFWCTVYGDSKKFLKDRIEEKYGNKLSEEQIKRILGFKFKDWGNLSKKFLELNGADTSTGESISIIRALWNNNLNLMELINSSLYNYKECLAEYQNTMLKTLSEIEAEDLNEYYFSAPVRRMIWQTILVIKELVKVLGCEPERIFVEMTRKPDEHKTRTSSRRNKFEELYKKVKDETTDWMQVIANAEEDGKIRSKKMYLYLTQKGRCMYTGKHIELDDLFDNNLYDIDHIYPRHFVKDDNIDNNLVLVCKEKNAHKSDHYPIEEEIFLSQKKMWLELRKSGFITEEKYNRLMDRNPFSDEQKAGFIARQLVETSQGTKGVANILRQLLPGSKIVYAKASNVSEFRCTRDDIQKSRLVNDFHHAHDAYLNIVVGNVYYVKFTQNPLNFIKKDYDKYKEDYNLSKMFDWDVKRNGEVAWIAQRKDGAAGTITTVKRMLSRNTPLMTRYSFDGKGGLTNETLYSAKKAKGEGYIPFKSSDDKMQDVTKYGGFTSVTGAYFFLVEHTEKKKRIRTIESVPVYLAQKIEQNPDELKKYCEEILELIDADIRLKKIKIGSLIKRNGYFCYITGKTGNRLIVRNAVNLCLKNEWIKYISKLEKVKEKDAVDKIITKEKNEVLYSELIQKFKHGIFSKRPNPVGDKLEKDSEKFNNLSIKDQCAVLCQVLRMAAILGSECDMTLLGDSPNCGKMLISKKIGDEEIYLINQSVTGLYEKKINLHTV

SEQ ID NO: 3109 - protein, 1342 aa, unidentified
  REGION 1..1342: note = Description of Unknown: uncultivated organism sequence
  REGION 1..1342: note = Category: MG91 effectors
  REGION 1..1342: note = Description: MG91-301 effector
MRYFMGLDMGTSSVGWAVTDEHYQLLRRKGKDMWGIREFEEAATAVERRTHRVSRRRRQRQVARIGLLQEYFHDAIHQVDPNFYQRLKNSKYHEEDKDEIVRGSNGIFNDAEYTDKEYFKEFPTIFHLRQELIKSKEPHDVRLVYLALLNMFKHRGHFLNATLSADGESRKIKDIYTDFVDKAAEQLGISFATDIKYEELENYLSSNDLSRKRKGELIAELLHVTRKDKQQYALIECMLGLDKSVKLMFGDTLPEDFDKTIKVNFSDIAFEEKATEISEAIGEEKYDLILIMKEIYDAAILNRIMNGYTYLSDARVAEYEKHKSDLACLKHYIKEYGTQHQFDFLFRGTEKGSYSAYVHSVNSHEKQRRNMDGNKKEDLYSTLKKILKDMPENEEKTHIMMQIELDNFLPKQLTASNGVIPNQIHLKEMKKILANAENYLPFLKEKDESGYTVSERIQKLFAFQIPYYIGPTTEKSAEFGGNGWVVRKEEGKVLPWNIDQKIDMKKTSEEFISRMVRRCTYMNDEQVLPKESLEYESFCVLNELNNIKVYGEKLPVDIKQDIYRTLCEKGKRITKKSLMKYLVGRGVIKAEDEEQLTGLMDGLNNTLKSFAKFKAIFGDAIYEDSCKKMVEQIIFWCTVYGDSKHFLKEQLLEKYGEVLTDAQIKRILGIKFRDWGNLSKKFLELQGCCKETGEVNSLIRMLWETNDNLMELLARDSYTFKEELENMQESTYKVLAELQPEDLDHMYFSAPVKRMIWQTILIIKEVTKVIGCQPERLFIEMTREHGQKNDIKDSRAKKFYELYSKIKDEDKDWRKVIEDADKDGRIRSKKMYLYLTQMGRCMYTGRPIELDQLFNNNLYDIDHIYPRHYVKDDNLENNMVLVEKQSNAHKSDVYPLESGIYEKQVNWWRELHRKNLINDEKLKRLTGRNPFTDEQKAGFIARQLVETSQGTKGVATILQEALPDTTLVYAKAKNVSDFRNDYDLLKSRIVNDFHHAHDAYLNIVIGNVYYVKFTKNPINFIREHGTYNLGKMYAKDVKRGDEIAWVAQSGNGQTATMETIRRTMARNTPLLTRMSYEVTGGLANQTLYSASKAKEGTYISLKSSDERMQDVTKYGGFTSVSTAYFMLVEHDGKKGKRIRTIESVPIMWKERIEKNPVELERYCLEVLKLSNPDIRVRKILIQSLIKRNGYFMYITGKTNKQLSVRNKVSLCLTQNWVNYIKNLENDNDDNITKKENLELYDILSDKHNNTIYRQRPNPVGSKLHKCRDRFINLEMNEQKVVLLEILKLTQIASTSANLELLGESKQTGVMFIGKDITALDEILLINQSVTGLYEQRVNLLTV

SEQ ID NO: 3110 - protein, 1353 aa, unidentified
  REGION 1..1353: note = Description of Unknown: uncultivated organism sequence
  REGION 1..1353: note = Category: MG91 effectors
  REGION 1..1353: note = Description: MG91-302 effector
MAAYYLGLDMGTSSVGWAVTNEQYELIKKKGKDLWGIREFDEAHTAVDRRMMRVSRRRRQRELARIGFLKEYFQDAIAEVDPNFYARLENSKYHLEDKDVSVRTYNGIFADKDYTDKEYFAEYPTIFHLRKELLESQEPHDVRLVYLALVNMFKHRGHFLNATLSSDSENRSIKDVWNEFAEQVYELLGISFSDEIDYMALQEIMCSTDISRKKKAEELVQLLKIDKKEKQKIALLECVIGLNVSIKTIFGACISDDFDPKMKISFSDAGYEEKIVDIQEVLGDENFELIAGMKALYDAAILNQIMGGNAYLSIARVQEYEKHKSDLKILKSIYRKYATKKDYDDMFRSTEKGSYSAYTNSTNSDKVANAENGGEPVRRGIEGRKKEDLYANIKKKLAEMPEDEDVQYVLNEIEKDHFLPKQLTASNGVIPNQIHLKEMKKILSNAENYLPFLKEKDESGYTTTERILKLFSFQIPYYVGPVTEKSARDGGNGWVVRKEDGVVLPWNINEKIDMKKTSEAFISRMVRRCTYMSGEQVLPKASLEYESFCVLNELNNLKVRGEKLPIEIKQNMYKDLFETGKRVTKNKIVKYLIGQGVLCEGNEDELTGLMDGINGTLSSFAKFRAVFGDAIYEDSCKKMVEQIIFWCTVYGDSKSFLKEQLEEKYAKDLTPEQMKRILGFKFKDWGNLSKEFLELNGCKKDTGEAASLIRMMWETNDNLMELLAKDKYTYQEKLQESQEKSYKILSEMQLEDLEDYYFSAPVKRMVWQTLLVIKEIEKVMGEPPKRLFVEMTRSEDKKKEMKDSRAKKFLELYKKIKDEDKDWKKIIESADEDGRIRSKKMYLYLTQKGRCMYTGRPIDLDQLFNNNLYDIDHIYPRHFVKDDNLENNLVLVEKEKNARKSDTYPLDEEIYKKQLNWWRELHQQNLINDEKFKRLTGRNPFSDEQKAGFIARQLVETSQGTKGVATILKEVFSEETTIVYAKARNVSDFRHDYDLLKSRIVNDFHHAQDAYLNIVVGNVYYVKFTQNPMNFIRENKSYNLGKMFAWDVKRGNETAWIAKPENGSAATIATVRKVMAKNTPLLTRLSFEGSGGIANQTLYSAKKAKEEGYIPLKSSDPKMQDIKKYGGYTSVTTAYFILVEHGTEKKRIRTIESVTLIWKDRIEKNPDELQVYCEEVLGLINPDIRVRKILIQSLIKREGYYMHISGKTGNQIKLRNAVSLCLKTTWTNYIKKLEKGEKTEEITKASNIALYEELMRKHKETIYAKRPNPVGDKLLSGEEKFEKMEVEIQIKVLLEILKLTQIGLPTADLREIGESANTGVMLMSKNITKLQEIKLIHQSVTGIYEQQVDLLTV

SEQ ID NO: 3111 - protein, 1352 aa, unidentified
  REGION 1..1352: note = Description of Unknown: uncultivated organism sequence
  REGION 1..1352: note = Category: MG91 effectors
  REGION 1..1352: note = Description: MG91-303 effector
MQEKPYYLGLDMGTNSVGWAVTDQHYNLLKAKGKDLLGIREFIEADTSVERRTHRISRRRRQREQARIGLLNDYFHDAIIAIDPSFFQRLENSKYHLEDKDQNVRYKYNIFNDPDYTDADYYTQYPTIYHLRKELLENPKPHDVRLVYLALLNMFKHRGHFLNSGISDGNNERSLKDAYINFAISVSELTEDYFNQDVDYSTIEGILSSRDLNRTKKAEELSTVLGIDFKNKKYKEYLRAICGLKINAYTLFSDQLPDDTTKIDLCVSDASFDEKSEELVSLIGEDLFQIILNIKEIYDIGSLAGILKGYTYLSQARVAAYDKHKHDLKLLKSSIKKYCTKEEYNNFFNSDADGSYASYIGSFNSGNKERRVGSKRTSEDLYKEIKKLLKGANKSDPAINEIFTSIETESFLPKQLTASNGIIPNQVHSKEMARILTNAENYLPFLKETDENNLSISNRILQLYKFQIPYYIGPVTEKSQRDGGNGWVIRKDNGRVFPWNIEEKIDVKATSEAFISRMVRRCTYMNGKQVLPKASLEYESFRVLNEINNLRIDGERIPVTLKQDIYTDLFQKGKKVTKKQLCNYLATRGLIESSEQVTGIDIAINNSLSTYGKFKAIFGEDIKLDHIQHMIEDIVFWCTVYGDSKQFLKEQIDDKYKGKLSPEQMKRILGFKFKDWGNLSKEFFELKGADKSTGEAVSIIRALWENNLNLMELINSSEFDFKEQLADYEANSLKTLSDFEPEDLNDYYFSAPVRRMIWQTTLIIKELVHVLGKEPARIFIEMTREKDASRGRTLSRKKKFEDLYKNVKDENTDWAKVIEHADESGTIRSKKMYLYLTQKGRCMYTGNHIELSDLFNDNLYDIDHIYPRHFVKDDNIDNNLVLVTKEKNAHKSDNYPLEAEIFNKQRNMWTQLRKEGFISEEKYNRLMGRNAFTDEQKAGFIARQLVETSQGTKGVAELFHQLLPNSKIVYAKAGNVSDFRRNRELPKSRLVNDFHHAHDAYLNIVVGNVYYVKFTQNPINYIKNSYNKDMNKNNYNLSRMFDWDVKRGDEVAWIAQKQDGAAGTISTVKKMLSKNTPLMTRLSYEGKGALANETLYSAEKAKGEGYIPFKSSDTKIQDVTKYGGFTSVTGAYFFLVEHDEKKKRIRTIESVPLYLADKIDKDSSELERYCDKLGLVNYDVRVRKIKIGSLIKYNGYFCYITGKTGYRLIVRNATNLCLTSNWRKYIKKIEKYKETTIIDNVITAEENIKLYNELLNKFTVGIFGRRPNPIGEKMDSARDKFASLSIENQCLALYQILQLTAILGNESDLQLIGASTHAGKMLISKKIGTDEIYLINQSPTGLFETKIDLQTI

SEQ ID NO: 3112 - protein, 1342 aa, unidentified
  REGION 1..1342: note = Description of Unknown: uncultivated organism sequence
  REGION 1..1342: note = Category: MG91 effectors
  REGION 1..1342: note = Description: MG91-304 effector
MRYFMGLDMGTSSVGWAVTDEHYQLLRRKGKDMWGIREFEEAATAVERRTHRVSRRRRQRQVARIGLLQEYFHDAIHQVDPNFYQRLKNSKYHEEDKDEIVRESNGIFNDAEYTDKEYFKEFPTIFHLRQELIKSKEPHDVRLVYLALLNMFKHRGHFLNATLSADGESRKIKDIYTDFVDKAAEQLGVSFATDIRYEELENYLSSNDLSRKRKGELIAELLHVTRKDKQQYALIECMLGLDKSVKLMFGDTLPENFDKTIKVNFSDIAFEEKATEISEAIGEEKYDLILIMKEIYDAAILNRIMNGYTYLSDARVAEYEKHKSDLAYLKHYIKEYGTQQQFDFLFRGTEKGSYSAYVHSVNSHEKQRRNMAGNKKEDLYSALKKMLKDMPENEEKTYIMMQIELDNFLPKQLTASNGVIPNQIHLKEMKKILANAENYLSFLKEKDESGYTVSERIQKLFAFQIPYYIGPTTEKSAEFGGNGWVVRKEEGKVLPWNIDQKIDMKKTSEKFISRMVRRCTYVNDEQVLPKESLEYESFCVLNELNNIKVYGEKLPVDIKQDIYRTLCEKGKRITKKSLMKYLVGRGVIKAEDEEQLTGLMDGLNNTLKSFAKFKTIFGDAIYEDSCKKMVEQIIFWCTVYGDSKHFLKEQLLEKYGEVLTDAQIKRILGIKFRDWGNLSKKFLELQGCCKETGEVNSLIRMLWETNDNLMELLARDSYTFKEELEKMQESTYKVLTELQPEDLDHMYFSAPVKRMIWQTILIIKEVTKVIGCQPERLFIEMTREHGQKNDIKDSRAKKFYELYSKIKDEDKDWRKVIEDADKDGRIRSKKMYLYLTQMGRCMYTGRPIELDQLFNNNLYDIDHIYPRHYVKDDNLENNMVLVEKQSNAHKSDVYPLESGIYEKQVNWWRELHRKNLINDEKLKRLTGRNPFTDEQKAGFIARQLVETSQGTKGVATILQEALPDTTLVYAKAKNVSDFRNDYDLLKSRIVNDFHHAHDAYLNIVIGNVYYVKFTKNPINFIREHGTYNLGKMYAKDVKRGDEIAWVAQSGNGQTATMETIRRTMARNTPLLTRMSYEVTGGLANQTLYSANTAKEGIYIPLKSSDEKMHDITKYGGFTSVKGAYFILVEHDDKKGKRIRTIESVPIMWKGRIEKNPAELERYCVEVLKLHNPEIKIRKILYKSLIRENGYYMYISSNEEGRLCMMNAVSLCLKQDWINYIHKLEKLNFENISREKNIKLYQILCDKHKNTIYINRPNSLGKLFDECKENFFDLTLNDQVTVLLEMLKTTQISLATANFSILNKGKNIGKMRMNKKISNEKDILLINQSVTGLYEQKVNLLTV

SEQ ID NO: 3113 - protein, 1245 aa, unidentified
  REGION 1..1245: note = Description of Unknown: uncultivated organism sequence
  REGION 1..1245: note = Category: MG91 effectors
  REGION 1..1245: note = Description: MG91-305 effector
MTAFKYYLGLDMGTNSVGWAATDPEYRLLKAKGKDLWGIREFNEASGAVERRTHRISRRRRQREQVRIGILKDYFHDAICEVDPSFFRRLENSKYHEEDKDVEVRYKNNIFNDGNYTDKDYFNEYPTIYHLRNELISSTEKHDVRLVFLALLNMFKHRGHFLNAGLGENNGESNIDNAYFELTELLSELTEYHLSQDIDCKQIEAILSRRDMSRTHKAEELAGVLHVDLKNKPYKELIRGLCGLKFNACVVFPDVQSEEVTKLDICLSESTFDEKSDEIANIIGEDYFEIIMAMKEMFDIGSLASIMKGHNYLSQARVASYTKHKEDLKLLKEVIKKYCGKKEYDKFFNSDADGSYASYVGSYNSKNKERRVGNKRTSEELYKEIKKLLKDAQKEDENVQKILTSIENETFLPKQLTASNGVIPNQVHAREMKKILSNAENYLPFLTEKDETGLSVSERILKLFTFQIPYYVGPTSENSGKNGGNGWVVRREDGQVLPWNIDEKIDMKATSEAFISRMVRRCTYISGEQVLPKASLEYQSYCVLNEINNIKIDGERISVELKQDIYKAVFQKGKKVTKKQLCKYLYTRGIIETEEQVTGVDVSINSALTTYGKFKPIFGEDISKDSVQKMIEDIVFWCTVYGDSRKFLKARIEEKYGNKLSEEQIKRILGFKFKDWGNLSKKFLELNGADTSTGESISIIRALWNNNLNLMELINSSLYNYKECLAEYQNTMLKTLSEIEAEDLNEYYFSAPVRRMIWQTILVIKELVKVLGCEPERIFVEMTRKPDEHKTRTSSRRNKFEELYKKVKDETTDWMQVIANAEEDGKIRSKKMYLYLTQKGRCMYTGKHIELDDLFDNNLYDIDHIYPRHFVKDDNIDNNLVLVCKEKNAHKSDHYPIEEEIFLSQKKMWLELRKSGFITEEKYNRLMDRNPFSDEQKAGFIARQLVETSQGTKGVANILRQLLPGSKIVYAKASNVSEFRHTRDDIPKSRLVNDFHHAHDAYLNIVVGNVYYVKFTQNPLNFIKKDYDNYKEDYNLSKMFDWDVKRNGEVAWIAQRKDGEAGTITTVKKMLSRNTPLMTRYSFEGKGGLANETLYSAKKAKGEGYIPFKSSDDKMQDVTKYGGFTKVAGAYFFLVEHTEKKKRIRTIESVPVYLTRKIEQKPGELKKYCDEILGLVDADIRLKKIKIGSLIKRNGYFCYITGKTGNQLSVRNAVNLCLKNEWIKYISKLEKVKEKDTIDKIITKE

SEQ ID NO: 3114 - protein, 1352 aa, unidentified
  REGION 1..1352: note = Description of Unknown: uncultivated organism sequence
  REGION 1..1352: note = Category: MG91 effectors
  REGION 1..1352: note = Description: MG91-306 effector
MQEKPYYLGLDMGTNSVGWAVTDQHYNLLKAKGKDLWGIREFIEADTSVERRTHRISRRRRQREQARIGLLNDYFHDAIIAIDPSFFQRLENSKYHLEDKDQNVRYKYNIFNDPDYTDADYYTQYPTIYHLRKELLENPKPHDVRLVYLALLNMFKHRGHFLNSGISDGNNERSLKDAYINFAISVSELTEDYFNQDVDYSTIEGILSSRDLNRTKKAEELSTVLGIDFKNKKYKEYLRAICGLKINAYTLFSDQLPDDTTKIDLCVSDASFDEKSEELVSLIGEDLFQIILNIKEIYDIGSLAGILKGYTYLSQARVAAYDKHKHDLKLLKSSIKKYCTKEEYNNFFNSDADGSYASYIGSFNSGNKERRVGSKRTSEDLYKEIKKLLKGANKSDPAINEIFTSIETESFLPKQLTASNGIIPNQVHSKEMARILTNAENYLPFLKETDENNLSISNRILQLYKFQIPYYIGPVTEKSQRDGGNGWVIRKDNGRVFPWNIEEKIDVKATSEAFISRMVRRCTYMNGKQVLPKASLEYESFRVLNEINNLRIDGERIPVTLKQDIYTDLFQKGKKVTKKQLCNYLATRGLIESSEQVTGIDIAINNSLSTYGKFKAIFGEDIKLDHIQHMIEDIVFWCTVYGDSKQFLKEQIEDKYKGKLSPEQMKRILGFKFKDWGNLSKEFFELKGADKSTGEAVSIIRALWENNLNLMELINSSEFDFKEQLADYEANSLKTLSDFEPEDLNDYYFSAPVRRMIWQTTLIIKELVHVLGKEPARIFIEMTREKDASRGRTLSRKKKFEDLYKNVKDENTDWAKVIEHADESGTIRSKKMYLYLTQKGRCMYTGNHIELSDLFNDNLYDIDHIYPRHFVKDDNIDNNLVLVTKEKNAHKSDNYPLEAEIFNKQRNMWTQLRKEGFISEEKYNRLMGRNAFTDEQKAGFIARQLVETSQGTKGVAELFHQLLPNSKIVYAKAGNVSDFRRNRELPKSRLVNDFHHAHDAYLNIVVGNVYYVKFTQNPINYIKNSYNKDMNKNNYNLSRMFDWDVKRGDEVAWIAQKQDGAAGTISTVKKMLSKNTPLMTRLSYEGKGALANETLYSAEKAKGEGYIPFKSSDTKIQDVTKYGGFTSVTGAYFFLVEHDEKKKRIRTIESVPLYLADKIDKDSSELERYCDKLGLVNYDVRVRKIKIGSLIKYNGYFCYITGKTGYRLIVRNATNLCLASNWRKYIKKIEKYKETTIIDNVITAEENIKLYNELLNKFTVGIFGRRPNPIGEKMDSARDKFASLSIENQCLALYQILQLTAILGNESDLQLIGASTHAGKMLISKKIGTDEIYLINQSPTGLFETKIDLQTI

SEQ ID NO: 3115 - protein, 1342 aa, unidentified
  REGION 1..1342: note = Description of Unknown: uncultivated organism sequence
  REGION 1..1342: note = Category: MG91 effectors
  REGION 1..1342: note = Description: MG91-307 effector
MRYFMGLDMGTSSVGWAVTDEHYQLLRRKGKDMWGIREFEEAATAVERRTHRVSRRRRQRQVARIGLLQEYFHDAIHQVDPNFYQRLKNSKYHEEDKDEIVRESNGIFNDAEYTDKEYFKEFPTIFHLRQELIKSKEPHDVRLVYLALLNMFKHRGHFLNATLSADGESRKIKDIYTDFVDKAAEQLGVSFATDIRYEELENYLSSNDLSRKRKGELIAELLHVTRKDKQQYALIECMLGLDKSVKLMFGDTLPEDFDKTIKVNFSDIAFEEKATEISEAIGEEKYDLILIMKEIYDAAILNRIMNGYTYLSDARVAEYEKHKSDLACLKHYIKEYGTQHQFDFLFRGTEKGSYSAYVHSVNSHEKQRRNMDGNKKEDLYSTLKKMLKDMPENEEKTYIMMQIELDNFLPKQLTASNGVIPNQIHLKEMKKILANAENYLPFLKEKDESGYTVSERIQKLFAFQIPYYIGPTTEKSAEFGGNGWVVRKEEGKVLPWNIDQKIDMKKTSEKFISRMVRRCTYMNDEQVLPKESLEYESFCVLNELNNIKVYGEKLPVDIKQDIYRTLCEKGKRITKKSLMQYLVGRGVIKAEDEEQLTGLMDGLNNTLKSFAKFKAIFGDAIYEDSCKKMVEQIIFWCTVYGDSKHFLKEQLLEKYGEVLTDAQIKRILGIKFRDWGNLSKKFLELQGCSKETGEVNSLIRMLWETNDNLMELLAQDSYTFKEELENMQESTYKVLAELQPEDLDHMYFSAPVKRMIWQTILIIKEVTKVIGCQPERLFIEMTREHGQKNDIKDSRAKKFYELYSKIKDEDKDWRKVIEDADKDGRIRSKKMYLYLTQMGRCMYTGRPIELDQLFNNNLYDIDHIYPRHYVKDDNLENNMVLVEKQSNAHKSDVYPLESGIYEKQVNWWRELHRKNLINDEKLKRLTGRNPFTDEQKAGFIARQLVETSQGTKGVATILQEALPDTTLVYAKARNVSEFRSDNDLLKSRIVNDFHHAHDAYLNIVIGNVYYVKFTKNPINFIREHGTYNLGKMFAKDVKRGDDIGWVAQSGNGQTATMETIKRTMARNTPLLTRMSYEVTGGLANQTLYSASKAKEGTYIPLKSSDERMQDVTKYGGFTSVSTAYFMLVEHDGKKGKRIRTIESVPIMWKERIEKNPAELERYCLEVLKLSNPDIRVRKILIQSLIKRNGYYMQITGKTGNRMYVRNMVSLCLVQDWVNYIKKLEKDKDENISKEKNIRLYDVLMDKHINTIYNTRPNPVGDLLIKRRSDFIELKITDQVIILLEILKLTQTALGSANLKLIGEAEKTGVMLISKDITALDEMLLINQSVTGLYEQRVNLLTV

SEQ ID NO: 3116 - protein, 1358 aa, unidentified
  REGION 1..1358: note = Description of Unknown: uncultivated organism sequence
  REGION 1..1358: note = Category: MG91 effectors
  REGION 1..1358: note = Description: MG91-308 effector
MEKEYYLGLDMGTNSVGWAVTDDAYNLIRFKGKDMWGIREFDEANPAVERRTHRTSRRREQRNAVRMGLIRSYFADEIQKVDSNFYQRLDNSFFYVEDKQDNVKDKNGIFNDKNYKDADYYKQYPTIFHLRKELIEDASQKDVRLVYLAVANMFKHRGHFLLSGIGSESSKQTITDLYNQVSGLITEEYGISLKTDIAGTDFEQVLCSREYSRTRKSEKVCEILEIKNSDKLKKAFVKSMCGLSVKITDIIDDTFTEISDEDKKITFSFVDSDYDEKAGVLEEKLGTDVYDIISKLKEIHDKAQVAEIMKNYQYLSFARVADYEKHKKDLKILKRVVKKYFEPTVYDKLFRSEENGTYSAYVNSFNSEEKSRRNYKERKQEDLYNSIKKLLKSVDNVDDTDIEYIKNEMDKENFLPKQLTFKNGVIPNQIHASELKAILKNAEKYLPFLNEKDESGYTVSERILMLFSFQIPYYVGPVSSNSNGWVKRLEPGQVLPWNIDKKIDLKETSEQFIQRMVRNCTYIAGEKVLPKASLLYENFKVLNEINNLSINGERITVNLKQDLYNTLFLKGKRVTRKQIFNYFHSRGLVEEDSQISGIDIAVNNSLSTYGKFLPLFGEHLKEDKYKKMVDDIVFWCTVYGDSRKFLREQLEEKYSDVLDENQIKRITGMKFKDWGNLSKEFLELSGCCKSTGEVMPLIRAMWETNYNLMELLHSEEFTYSEELEEKQGKIEKVLSEYTIDDLNEEYFSAPVKRMVWQTLLIIKEIEKIMKCPPTRIFVEMTRKDDEKGDNGRKSSRKDQLLALYKKIQSEDKEWKKEMSSRIEDYDKNGALRSKKLYLYFIQKGLDMYTGKPIDLDNLMSANSNYDIDHIYPRHFVKDDNINNNLVLASKPANAEKSDIYPIKDSIYQKMKYTWKVLRDEGLITEEKYKRLTGRNPFTDEQKAGFIARQLVETGQGTKGVADLLTALLPDTKLVYSKAGNVSDFRKRYDIPKSRLINDFHHAHDAYLNIVVGNIYFTKFTSNPLNYIRKECSSKDNKYQYNLGNMYKWDVKRDGKTAWVAPEEGETGTLATVKKMLSRNTPILTRLTIEGHGGIADATLYSHKKAKQDTYIPLKSSDARMADVTKYGGYSSVTTAYLFLVEHEIKGKKIRTLETVPLYLKDRLENSKEKLEEYCRETLGYTNPSVRMKKIKLQSLIKLNGYYMQISGKTNKQFTVRNYVQFCLNSKWVDYIHKLEKYQDKGVIDDAITDEKNVELYNVLCEKHSVGIFTLRPNPVGDKIKKGYDKFVNLTTEEQIKLLIEIIKLTCVGIVSANLTLIGGASISGKMLISKNITDAKECLLINQSVTGLYENRIDLLRV

SEQ ID NO: 3117 - protein, 1358 aa, unidentified
  REGION 1..1358: note = Description of Unknown: uncultivated organism sequence
  REGION 1..1358: note = Category: MG91 effectors
  REGION 1..1358: note = Description: MG91-309 effector
MEKEYYLGLDMGTNSVGWAVTDDAYNLIRFKGKDMWGIREFDEANPAVERRTHRTSRRREQRNAVRMGLIRSYFADEIQKVDSNFYQRLDNSFFHVEDKQDNVKDKNGIFNDKNYKDADYYKQYPTIFHLRKELIEDASQKDVRLVYLAVANMFKHRGHFLLSGIGSESSKQTITDLYNQVSGLITEEYGISLKTDIAGTDFEQVLCSREYSRTRKSEKVCEILEIKNSDKLKKAFVKSMCGLSVKITDVIDDTFTEISDEDKKITFSFVDSDYDEKAGVLEEKLGTDVYDIISKLKEIHDKAQVAEIMKNYQYLSFARVADYEKHKKDLKILKRVVKKYFEPTVYDKLFRSGENGTYSAYVNSFNSGEKSRRNYKERKQEDLYNSIKKLIKSIDNVCDTDIEYIKNEIEKENFLPKQLTFKNGVIPNQIHASELKAILKNAEKYLPFLNEKDESGYTVSERILMLFSFQIPYYVGPVSPNSNGWVKRLEPGQVLPWNIDKKIDLKETSEQFIQRMVRNCTYIAGEKVLPKASLLYENFKVLNEINNLSINGERIAVALKQDLYNTLFLKGKRVTRKQIFNYFHSRGLVEEDSQISGIDIAVNNSLSTYGKFLPLFGEHLKEDKYKKMVDDIVFWCTVYGDSRKFLREQLEEKYSDVLDENQIKRITGMKFKDWGNLSKEFLELSGCCKSTGEMIPLIRAMWETNYNLMELLHSEEFTYSEELEEKQGKIEKVLSEYTIDDLNEEYFSAPVKRMVWQTLLIIKEIEKIMKCPPTRIFVEMTRKDDEKGDNGRKSSRKDQLLALYKKIQSEDKEWKKEMSSRIEDYDKNGALRSKKLYLYFIQKGLDMYTGKPIDLDNLMSANSNYDIDHIYPRHFVKDDNINNNLVLASKPANAEKSDIYPIKDSIYQKMKYTWKVLRDEGLITEEKYKRLTGRNPFTDEQKAGFIARQLVETGQGTKGVADLLTALLPDTKLVYSKAGNVSDFRKRYDIPKSRLINDFHHAHDAYLNIVVGNIYFTKFTSNPLNYIRKECSSKDNKYQYNLGNMYKWDVKRDGKTAWIAAKEGETGTIATVKKILSRNTPTLTRLTIEGHGGIADATLYSHKKAKQDAYIPLKSSDARMADVTKYGGYSSVTTAYLFLVEHEIKGKKIRTLETVPLYLKDRLENSKEKLEEYCRESLGYTNPSVRMKKIKLQSLIKLNGYYMQISGKSIKQFEVRNYVQICLNGKWVDYIHKLEKYQDKGVIDNAITDEKNVELYNILCEKHSVGIFTLRPNPVGDKIKKGYDKFVNLTTEEQIKLLIEIIKLTCVGIVKADLRLIGASEKSGTMKINKNITDAKECFLINQSVTGLYENRIDLLRV

SEQ ID NO: 3118 - protein, 1352 aa, unidentified
  REGION 1..1352: note = Description of Unknown: uncultivated organism sequence
  REGION 1..1352: note = Category: MG91 effectors
  REGION 1..1352: note = Description: MG91-310 effector
MQEKPYYLGLDMGTNSVGWAVTDQHYNLLKAKGKDLWGIREFIEADTSVERRTHRISRRRRQREQARIGLLNDYFHDAIIAIDPSFFQRLENSKYHLEDKDQNVRYKYNIFNDPDYTDADYYTQYPTIYHLRKELLENPKPHDVRLVYLALLNMFKHRGHFLNSGISDGNNERSLKDAYINFAISVSELTEDYFNQDVDYSTIEGILSSRDLNRTKKAEELSTVLGIDFKNKKYKEYLRAICGLKINAYTLFSDQLPDDTTKIDLCVSDASFDEKSEELVSLIGEDLFQIILNIKEIYDIGSLAGILKGYTYLSQARVAAYDKHKHDLKLLKSSIKKYCTKEEYNNFFNSDADGSYASYIGSFNSGNKERRVGSKRTSEDLYKEIKKLLKGANKSDPAINEIFTSIETESFLPKQLTASNGIIPNQVHSKEMARILTNAENYLPFLKETDENNLSISNRILQLYKFQIPYYIGPVTEKSQRDGGNGWVIRKDNGRVFPWNIEEKIDVKATSEAFISRMVRRCTYMNGKQVLPKASLEYESFRVLNEINNLRIDGERIPVTLKQDIYTDLFQKGKKVTKKQLCNYLATRGLIESSEQVTGIDIAINNSLSTYGKFKAIFGEDIKLDHIQHMIEDIVFWCTVYGDSKQFLKEQIEDKYKGKLSPEQMKRILGFKFKDWGNLSKEFFELKGADKSTGEAVSIIRALWENNLNLMELINSPEFDFKEQLADYEANSLKTLSDFEPEDLNDYYFSAPVRRMIWQTTLIIKELVHVLGKEPARIFIEMTREKDASRGRTLSRKKKFEDLYKNVKDENTDWAKVIEHADESGTIRSKKMYLYLTQKGRCMYTGNHIELSDLFNDNLYDIDHIYPRHFVKDDNIDNNLVLVTKEKNAHKSDNYPLEAEIFNKQRNMWTQLRKEGFISEEKFNRLMGRNAFTDEQKAGFIARQLVETSQGTKGVAELFHQLLPNSKIVYAKAGNVSDFRRNREFPKSRLVNDFHHAHDAYLNIVVGNVYYVKFTQNPINYIKNSYNKDMNKNNYNLSRMFDWDVKRGDEVAWIAQKQDGAAGTISTVKKMLSKNTPLMTRLSYEGKGALANETLYSAEKAKGEGYIPFKSSDTKIQDVTKYGGFTSVTGAYFFLVEHDEKKKRIRTIESVPLYLADKIDKDSSELERYCDKLGLVNYDVRVRKIKIGSLIKYNGYFCYITGKTGYRLIVRNATNLCLASNWRKYIKKIEKYKETTIIDNVITAEENIKLYNELLNKFTVGIFGRRPNPIGEKMDSARDKFASLSIENQCLALYQILQLTAILGNESDLQLIGASTHAGKMLISKKIGTDEIYLINQSPTGLFETKIDLQTI

SEQ ID NO: 3119 - protein, 1342 aa, unidentified
  REGION 1..1342: note = Description of Unknown: uncultivated organism sequence
  REGION 1..1342: note = Category: MG91 effectors
  REGION 1..1342: note = Description: MG91-311 effector
MRYFMGLDMGTSSVGWAVTDEHYQLLRRKGKDMWGIREFEEAATAVERRTHRVSRRRRQRQVARIGLLQEYFHDAIHQVDPNFYQRLKNSKYHEEDKDEIVRGSNGIFNDAEYTDKEYFKEFPTIFHLRQELIKSKEPHDVRLVYLALLNMFKHRGHFLNATLSADGESRKIKDIYTDFVDKAAEQLGISFATDIKYEELENYLSSNDLSRKRKGELIAELLHVTRKDKQQYALIECMLGLDKSVKLMFGDTLPEDFDKTIKVNFSDIAFEEKATEISEAIGEEKYDLILIMKEIYDAAILNRIMNGYTYLSDARVAEYEKHKSDLACLKHYIKEYGTQHQFDFLFRGTEKGSYSAYVHSVNSHEKQRRNMDGNKKEDLYSTLKKILKDMPENEEKTHIMMQIELDNFLPKQLTASNGVIPNQIHLKEMKKILANAENYLPFLKEKDESGYTVSERIQKLFAFQIPYYIGPTTEKSAEFGGNGWVVRKEEGKVLPWNIDQKIDMKKTSEEFISRMVRRCTYMNDEQVLPKESLEYESFCVLNELNNIKVYGEKLPVDIKQDIYRTLCEKGKRITKKSLMKYLVGRGVIKAEDEEQLTGLMDGLNNTLKSFAKFKAIFGDAIYEDSCKKMVEQIIFWCTVYGDSKHFLKEQLLEKYGEVLTDAQIKRILGIKFRDWGNLSKKFLELQGCSKETGEVNSLIRMLWETNDNLMELLAQDSYTFKEELENMQESTYKVLAELQPEDLDHMYFSAPVKRMIWQTILIIKEVTKVIGCQPERLFIEMTREHGQKNDIKDSRAKKFYELYSKIKDEDKDWRKVIEDADKDGRIRSKKMYLYLTQMGRCMYTGRPIELDQLFNNNLYDIDHIYPRHYVKDDNLENNMVLVEKQSNAHKSDVYPLESGIYEKQVNWWRELHRKNLINDEKLKRLTGRNPFTDEQKAGFIARQLVETSQGTKGVATILQEALPDTTLVYAKARNVSDFRKDNDLLKSRIVNDFHHAHDAYLNIVIGNVYYVKFTKNPINFIREHGTYNLGKMYAKDVKRGDEIAWVAQSGNGQTATMETIRRTMARNTPLLTRMSYEVTGGLANQTLYSANTAKEGTYIPLKSSDERMQDVTKYGGFTSVSTAYFMLVEHDGKKGKRIRTIESVPIMWKERIEKNPVELERYCLEVLKLSNPDIRVRKILIQSLIKRNGYFMYITGKTNKQLSVRNKVSLCLTQNWVNYIKNLENDNDDNITKKENLELYDILSDKHNNTIYRQRPNPVGSKLHKCRDRFINLKMNEQKVVLLEILKLTQIASTSANLELLGESKQTGVMFIGKDITALDEILLINQSVTGLYEQRVNLLTV

SEQ ID NO: 3120 - protein, 1352 aa, unidentified
  REGION 1..1352: note = Description of Unknown: uncultivated organism sequence
  REGION 1..1352: note = Category: MG91 effectors
  REGION 1..1352: note = Description: MG91-312 effector
MTAFKYYLGLDMGTNSVGWAATDPEYRLLKAKGKDLWGIREFNEASGAVERRTHRISRRRRQREQVRIGILKDYFHDAICEVDPSFFQRLENSKYHEEDKDVEVRYKNNIFNDSNYTDKDYFNEYPTIYHLRNELISSTEKHDVRLVFLALLNMFKHRGHFLNAGLGENNGESNIDNAYFELTELLSELTEYHLSQDIDCKQIEAILSRRDMSRTHKAEELAGVLHVDLKNKPYKELIRGLCGLKFNACVVFPDVQSEEVTKLDICLSESTFDEKSDEIANIIGEDYFEIIMAMKEMFDIGSLASIMKGHNYLSQARVASYTKHKEDLKLLKEVIKKYCGKKEYDKFFNSDADGSYASYVGSYNSKKKERRVGNKRTSEELYKEIKKLLKDAQKEDENVQKILTSIENETFLPKQLTASNGVIPNQVHAREMKKILSNAENYLPFLTKKDETGLSVSERILKLFTFQIPYYIGPTSENSGKNGGNGWVVRREDGQVLPWNIDEKIDMKATSEAFISRMVRRCTYISGEQVLPKASLEYQSYCVLNEINNIKIDGERISVELKQDIYKAVFQKGKKVTKKQLCKYLHTRGIIETEEQVTGVDVSINNALTTYGKFKPIFGEDISKDSVQKMIEDIVFWCTVYGDSKKFLKDRIEEKYGNKLSEEQIKRILGFKFKDWGNLSKKFLELNGADTSTGESISIIRALWNNNLNLMELINSSLYNYKECLAEYQNTMLKTLSEIEAEDLNEYYFSAPVRRMIWQTILVIKELVKVLGCEPERIFVEMTRKPDEHKTRTSSRRNKFEELYKKVKDETTDWMQVIANAEEDGKIRSKKMYLYLTQKGRCMYTGKHIELDDLFDNNLYDIDHIYPRHFVKDDNIDNNLVLVCKEKNAHKSDHYPIEEEIFLSQKKMWLELRKSGFITEEKYNRLMDRNPFSDEQKAGFIARQLVETSQGTKGVANILRQLLPGSKIVYAKASNVSEFRHTRDDIPKSRLVNDFHHAHDAYLNIVVGNVYYVKFTQNPLNFIKKDYDKYKEDYNLSKMFDWDVKRNGEVAWIAQRKDGEAGTITTVKKMLSRNTPLMTRYSFEGKGGLANETLYSAKKAKGEGYIPFKSSDDKMQDVTKYGGFTSVTGAYFFLVEHTEKKKRIRTIESVPVYLAQKIEQNPDELKKYCEEILGLIDADIRLKKIKIGSLIKRNGYFCYITGKTGKQLIVRNAVNLCLKNEWIKYISKLEKVKEIDAVDKIITKEKNEVLYSELIQKFKHGIFSKRPNPVGDKLEKGSEKFSNLSIKEQCAVLCQILQLAAVLGSECDMTLLGESAHCGKMLISKKIGDEEIYLINQSVTGLYEKKINLHTV

SEQ ID NO: 3121 - protein, 1351 aa, unidentified
  REGION 1..1351: note = Description of Unknown: uncultivated organism sequence
  REGION 1..1351: note = Category: MG91 effectors
  REGION 1..1351: note = Description: MG91-313 effector
MAAYYLGLDMGTSSVGWAVTNEQYELIKKKGKDLWGIREFDEAHTAVDRRMMRVSRRRRQRELARIGLLKEYFQDAIAEVDPNFYARLENSKYHLEDKDVSVRTYNGIFADKDYTDKEYFAEYPTIFHLRKELLESQEPHDVRLVYLALVNMFKHRGHFLNATLSSDSENRSIKDVWNEFAEQVYELLGISFSDEIDYMALQEIMCSTDISRKKKAEELVQLLKIDKKEKQKIALLECVIGLNVSIKTIFGACISDDFDPKMKISFSDAGYEEKIVDIQEVLGDENFELIAGMKALYDAAILNQIMGGNAYLSIARVQEYEKHKSDLKILKSIYRKYATKKDYDDMFRSTEKGSYSAYTNSTNSDKVANAENGGEPVRRGIEGRKKEDLYANIKKKLAEMPEDVQYVLNEIEKDHFLPKQLTASNGVIPNQIHLKEMKKILSNAENYLLFLKEKDESGYTTTERILKLFSFQIPYYVGPVTEKSARDGGNGWVVRKEDGVVLPWNINEKIDMKKTSEAFISRMVRRCTYMSGEQVLPKASLEYESFCVLNELNNLKVRGEKLPIEIKQNMYKDLFETGKRVTKNKIVKYLIGQGVLCEGNEDELTGLMDGINGTLSSFAKFRAVFGDAIYEDSCKKMVEQIIFWCTVYGDSKSFLKEQLEEKYAKDLTPEQMKRILGFKFKDWGNLSKEFLELNGCKKDTGEAASLIRMMWETNDNLMELLAKDKYTYQEKLQESQEKSYKILSEMQPEDLEDYYFSAPVKRMVWQTLLVIKEIEKVMGEPPKRLFVEMTRSEDKKKEMKDSRTKKFLELYKKIKDEDKDWKKIIESADEDGRIRSKKMYLYLTQKGRCMYTGRPIDLDQLFNNNLYDIDHIYPRHFVKDDNLENNLVLVEKEKNARKSDTYPLDEEIYKKQLNWWRELHQQNLINDEKFKRLTGRNPFSDEQKAGFIARQLVETSQGTKGVATILKEVLPEETTIVYAKARNVSDFRHDYNLLKSRIVNDFHHAQDAYLNIVVGNVYYVKFTQNPMNFIRENKSYNLGKMFAWDVKRGNETAWIAKPENGSAATIATVRKVMAKNTPLLTRLSFEGSGGIANQTLYSAKKTKEEGYIPLKSSDPKMQDIKKYGGYTSVTTAYFILVEHGTEKKRIRTIESVTLIWKDRIEKNPDELQVYCEKVLGLINPDIRVRKILIQSLIKREGYYMHISGKTENRLTLRNAVSLCLKTTWINYIKKLEKGEKTEEITKTSNIALYEELMRKHKETIYAKRPNPVGDKLLYGEDKFEKLELETQIKILLEILKLTQIGLPEADLREIGGAKSTGTIKVGKKISGLHELKLIHQSVTGIYEQQVDLLTV

SEQ ID NO: 3122 - protein, 1352 aa, unidentified
  REGION 1..1352: note = Description of Unknown: uncultivated organism sequence
  REGION 1..1352: note = Category: MG91 effectors
  REGION 1..1352: note = Description: MG91-314 effector
MTAFKYYLGLDMGTNSVGWAATDPGYRLLKAKGKDLWGIREFNEASGAVERRTHRISRRRRQREQVRIGILKDYFHDAICEVDPSFFQRLENSKYHEEDKDVEVRYKNNIFNDSNYTDKDYFNEYPTIYHLRNELISSTEKHDVRLVFLALLNMFKHRGHFLNAGLGENNGESNIDNAYFELTELLSELTEYHLSQDIDCKQIEAILSRRDMSRTHKAEELAGVLHVDLKNKPYKELIRGLCGLKFNACVVFPDVQSEEVTKLDICLSESTFDEKSDEIANIIGEDYFEIIMAMKEMFDIGSLASIMKGHNYLSQARVASYTKHKEDLKLLKEVIKKYCGKKEYDKFFNSDADGSYASYVGSYNSKNKERRVGNKRTSEELYKEIKKLLKDAQKEDENVQKILTSIENETFLPKQLTASNGVIPNQVHAREMKKILSNAENYLPFLTEKDETGLSVSERILKLFTFQIPYYVGPTSENSGKNGGNGWVVRREDGQVLPWNIDEKIDMKATSEAFISRMVRRCTYISGEQVLPKASLEYQSYCVLNEINNIKIDGERISVELKQDIYKAVFQKGKKVTKKQLCKYLHTRGIIETEEQVTGVDVSINNALTTYGKFKPIFGEDISKDSVQKMIEDIVFWCTVYGDSKKFLKDRIEEKYGNKLSEEQIKRILGFKFKDWGNLSKKFLELNGADTSTGESISIIRALWNNNLNLMELINSSLYNYKECLAEYQNTMLKTLSEIEAEDLNEYYFSAPVRRMIWQTILVIKELVKVLGCEPERIFVEMTRKPDEHKTRTSSRRNKFEELYKKVKDETTDWMQVIANAEEDGKIRSKKMYLYLTQKGRCMYTGKHIELDDLFDNNLYDIDHIYPRHFVKDDNIDNNLVLVCKEKNAHKSDHYPIEEEIFLSQKKMWLELRKSGFITEEKYNRLMDRNPFSDEQKAGFIARQLVETSQGTKGVTNILRQLLPGSKIVYAKASNVSEFRCTRDDIQKSRLVNDFHHAHDAYLNIVVGNVYYVKFTQNPLNFIKKDYDKYKEDYNLSKMFDWDVKRNGEVAWIAQRKDGAAGTITTVKRMLSRNTPLMTRYSFDGKGGLTNETLYSAKKAKGEGYIPFKSSDDKMQDVTKYGGFTSVTGAYFFLVEHTEKKKRIRTIESVPVYLAQKIEQNPDELKKYCEEILGLIDADIRLKKIKIGSLIKRNGYFCYITGKTVNRLIVRNAVNLCLKNEWIKYISKLEKVKEKDAVDKIITKEKNEVLYSELIQKFKHGIFSKRPNPVGDKLEKDSEKFNNLSIKDQCAVLCQVLRMAAILGSECDMTLLGDSPNCGKMLISKKIGDEEIYLINQSVTGLYEKKINLHTV

SEQ ID NO: 3123 - protein, 1352 aa, unidentified
  REGION 1..1352: note = Description of Unknown: uncultivated organism sequence
  REGION 1..1352: note = Category: MG91 effectors
  REGION 1..1352: note = Description: MG91-315 effector
MTAFKYYLGLDMGTNSVGWAATDPEYRLLKAKGKDLWGIREFNEASGAVERRTHRISRRRRQREQVRIGILKDYFHDAICEVDPSFFQRLENSKYHEEDKDVEVRYKNNIFNDSNYTDKDYFNEYPTIYHLRNELISSTEKHDVRLVFLALLNMFKHRGHFLNAGLGENNGESNIDNVYFELTELLSELTEYHLSQDIDCKQIEAILSRRDMSRTHKAEELAGVLHVDLKNKPYKELIRGLCGLKFNACVVFPDVQSEEVTKLDICLSESTFDEKSDEIANIIGEDYFEIIMAMKEMFDIGSLASIMKGHNYLSQARVASYTKHKEDLKLLKEVIKKYCGKKEYDKFFNSDADGSYASYVGSYNSKNKERRVGNKRTSEELYKEIKKLLKDAQKEDENVQKILTSIENETFLPKQLTASNGVIPNQVHAREMKKILSNAENYLPFLTEKDETGLPVSERILKLFTFQIPYYVGPTSENSGKNGGNGWVVRREDGQVLPWNIDEKIDMKATSEAFISRMVRRCTYISGEQVLPTASLEYQSYCVLNEINNIKIDGERISVELKQDIYKAVFQKGKKVTKKQLCKYLHTRGIIETEEQVTGVDVSINNALTTYGKFKPIFGEDISKDSVQKMIEDIVFWCTVYGDSKKFLKDRIEEKYGNKLSEEQIKRILGFKFKDWGNLSKKFLELNGADTSTGESISIIRALWNNNLNLMELINSSLYNYKECLAEYQNTMLKTLSEIEAEDLNEYYFSAPVRRMIWQTILVIKELVKVLGCEPERIFVEMTRKPDEHKTRTSSRRNKFEELYKKVKDETTDWMQVIANAEEDGKIRSKKMYLYLTQKGRCMYTGKHIELDDLFDNNLYDIDHIYPRHFVKDDNIDNNLVLVCKEKNAHKSDHYPIEEEIFLSQKKMWLELRKSGFITEEKYNRLMGRNPFSDEQKAGFIARQLVETSQGTKGVANILRQLLPGSKIVYAKASNVSEFRRTRDDIPKSRLVNDFHHAHDAYLNIVVGNVYYVKFTQNPLNFIKKDYDNYKEDYNLSKMFDWDVKRNGEVAWIAQRKDGEAGTITTVKKMLSRNTPLMTRYSFEGKGGLANETLYSAKKAKGEGYIPFKSSDDKMQDVTKYGGFTSVTGAYFFLVEHAEKKKRIRTIESVPVYLAQKIEQNPDELKKYCEEILGLIDADIRLKKIKIGSLIKRNGYFCYITGKTGKQLIVRNAVNLCLKNEWIKYISKLEKVKEKDAVDKIITKEKNEVLYSELIQKFKHGIFSKRPNPVGDKLEKGSEKFSNLSIKEQCTVLCQILQLAAVLGSECDMTLLGESAHCGKMLISKKIGDEEIYLINQSVTGLYEKKINLHTV

SEQ ID NO: 3124 - protein, 1352 aa, unidentified
  REGION 1..1352: note = Description of Unknown: uncultivated organism sequence
  REGION 1..1352: note = Category: MG91 effectors
  REGION 1..1352: note = Description: MG91-316 effector
MTAFKYYLGLDMGTNSVGWAATDPEYRLLKAKGKDLWGIREFNEASGAVERRTHRISRRRRQREQVRIGILKDYFHDAICEVDPSFFRRLENSKYHEEDKDVEVRYKNNIFNDGNYTDKDYFNEYPTIYHLRNELISSTEKHDVRLVFLALLNMFKHRGHFLNAGLGENNGESNIDNAYFELTELLSELTEYHLSQDIDCKQIEAILSRRDMSRTHKAEELAGVLHVDLKNKPYKELIRGLCGLKFNACVVFPDVQSEEVTKLDICLSESSFDEKSDEIANIIGEDYFEIIMAMKEMFDIGSLASIMKGHNYLSQARVASYTKHKEDLKLLKEVIKKYCGKKEYDKFFNSDADGSYASYVGSYNSKNKERRVGNKRTSEELYKEIKKLLKDAPKEDENVQKILTSIENETFLPKQLTASNGVIPNQVHAREMKKILSNAENYLPFLTEKDETGLSVSERILKLFTFQIPYYVGPTSENSGKNGGNGWVVRREDGQVLPWNIDEKIDMKATSEAFISRMVRRCTYISGEQVLPKASLEYQSYCVLNEINNIKIDGERISVELKQDIYKAVFQKGKKVTKKQLCKYLHTRGIIETEEQVTGVDVSINNALTTYGKFKPIFGEDISKDSVQKMIEDIVFWCTVYGDSKKFLKDRIEEKYGNKLSEEQIKRILGFKFKDWGNLSKKFLELNGADTSTGESISIIRALWNNNLNLMELINSSLYNYKECLAEYQNTMLKTLSEIEAEDLNEYYFSAPVRRIIWQTILVIKELVKVLGCEPERIFVEMTRKPDEHKTRTSSRRNKFEELYKKVKDEATDWMQVIAKAEEDGKIRSKKMYLYLTQKGRCMYTGKHIELDDLFDKNLYDIDHIYPRHFVKDDNIDNNLVLVCKEKNAHKSDHYPIEEEIFLSQKKMWLELRKSGFITEEKYNRLMGRSPFSDEQKAGFIARQLVETSQGTKGVANILRQLLPGSKIVYAKASNVSEFRHTRDDIPKSRLVNDFHHAHDAYLNIVVGNVYYVKFTQNPLNFIKKDYDKYKEDYNLSKMFDWDVKRNGEVAWIAQRKDGEAGTITTVKRMLSRNTPLMTRYSFEGKGGLANETLCSAKKAKGEGYIPFKSSDDKMQDVTKYGGFTKVTGAYFFLVEHTEKKKRIRTIESVPVYLAQKIEQNPDELKKYCEEILGLVDADIRLKKIKIGSLIKRNGYFCYITGKTGNRLSVRNAVNLCLKNEWIKYISKLEKVKEKDAVDEIITKEKNEVLYSELIQKFKHGIFSKRPNPVEDKLEKGSEKFSNLSIKEQCAVLCQILQLAAVLGSECDMTLLGDSPNCGKMLISKKIGDEEIYLLNQSVTGLYEKKINLHTV

SEQ ID NO: 3125 - protein, 1352 aa, unidentified
  REGION 1..1352: note = Description of Unknown: uncultivated organism sequence
  REGION 1..1352: note = Category: MG91 effectors
  REGION 1..1352: note = Description: MG91-317 effector
MTAFKYYLGLDMGTNSVGWAATDPEYRLLKAKGKDLWGIREFNEASGAVERRTHRISRRRRQREQVRIGILKDYFHDAICEVNPSFFRRLENSKYHEEDKDVEVRYKNNIFNDGNYTDKDYFNEYPTIYHLRNELISSTEKHDVRLVFLALLNMFKHRGHFLNAGLGENNGESNIDNAYFELTELLSELTEYHLSQDIDCKQIEAILSRRDMSRTHKAEELAGVLHVDLKNKPYKELIRGLCGLKFNACVVFPDVQSEEVTKLDICLSESSFDEKSDEIANIIGEDYFEIIMAMKEMFDIGSLASIMKGHNYLSQARVASYTKHKEDLKLLKEVIKKYCGKKEYDKFFNSDADGSYASYVGSYNSKNKERRVGNKRTSEELYKEIKKLLKDAPKEDENVQKILTSIENETFLPKQLTASNGVIPNQVHAREMKKILSNAENYLPFLTEKDETGLSVSERILKLFTFQIPYYVGPTSENSGKNGGNGWVVRREDGQVLPWNIDEKIDMKATSEAFISRMVRRCTYISGEQVLPKASLEYQSYCVLNEINNIKIDGERISVELKQDIYKAVFQKGKKVTKKQLCKYLHTRGIIETEEQVTGVDVSINNALTTYGKFKPIFGEDISKDSVQKMIEDIVFWCTVYGDSKKFLKDRIEEKYGNKLSEEQIKRILGFKFKDWGNLSKKFLELNGADTSTGESISIIRALWNNNLNLMELINSSLYNYKECLAEYQNTMLKTLSEIEAEDLNEYYFSAPVRRIIWQTILVIKELVKVLGCEPERIFVEMTRRPDEHKTRTSSRRNKFEELYKKVKDEATDWMQVIAKAEEDGKIRSKKMYLYLTQKGRCMYTGKHIELDDLFDKNLYDIDHIYPRHFVKDDNIDNNLVLVCKEKNAHKSDHYPIEEEIFLSQKKMWLELRKSGFITEEKYNRLMGRSPFSDEQKAGFIARQLVETSQGTKGVANILRQLLPGSKIVYAKASNVSEFRHTRDDIPKSRLVNDFHHAHDAYLNIVVGNVYYVKFTQNPLNFIKKDYDKYKEDYNLSKMFDWDVKRNGEVAWIAQRKDGEAGTITTVKRMLSRNTPLMTRYSFEGKGGLANETLCSAKKAKGEGYIPFKSSDDKMQDVTKYGGFTKVTGAYFFLVEHTEKKKRIRTIESVPVYLAQKIEQNPDELKKYCKEILGLVDADIRLKKIKIGSLIKRNGYFCYITGKTGNRLSVRNAVNLCLKNEWIKYISKLEKVKEKDAVDEIITKEKNEVLYSELIQKFKHGIFSKRPNPVEDKLEKGSEKFSNLSIKEQCAVLCQILQLAAVLGSECDMTLLGESAHCGKMLISKKIGDEEIYLLNQSVTGLYEKKINLHTV

SEQ ID NO: 3126 - protein, 359 aa, unidentified
  REGION 1..359: note = Description of Unknown: uncultivated organism sequence
  REGION 1..359: note = Category: MG91 effectors
  REGION 1..359: note = Description: MG91-318 effector
MYNKGGKNTTVSAKVNTNLSPDEKPKDLRGRFLSNQNYRLMKSVLRFSSEYVQGVRRVNDLVEMKCDDTKCKEITTNAKCQGECGKIFNNGKFLFCVYDTSAAAATASSSGEAKFKLVCNLCSNDYSYNNRYEVLQLFPTVSQQVVERLCEIGFLTKYIFPIKLNYTETQTKTEVINYHDFYKMVKSIIKEKKSNEQITEIKLSTYGRDLFVETDDFCVMRKDSNEFNETVYELDFFPKQSSMLEFLKIYKDNKPLTYFYTVKKRVYLSIFDYAVYFPFKCVLFCKVCTKNKMYLKTHPVLYCSKCGFTDPMFFNNSAFLESTIFLAKCVKYKTMPVARIFYYDMTLYKTFIKKPFVKK

SEQ ID NO: 3127 - protein, 1359 aa, unidentified
  REGION 1..1359: note = Description of Unknown: uncultivated organism sequence
  REGION 1..1359: note = Category: MG91 effectors
  REGION 1..1359: note = Description: MG91-319 effector
MRETGKDYYLGLDMGTNSVGWAVTDENYVLMRAKGKDLWGIREFDEALTAVDRRTHRVARRRRQREIARIGLLKEYFHDAIAEVDPDFYQRLDNSKYHEEDKDSAVKGKNGIFNDANYNDKDYFKQYPTIFHLRKELIESTEKHDVRLVYLALLNMFKHRGHFLNAGLSTESENTMDTAYHNFVETAAQTIECNFMETVDIEKIKEILGSRDYSRSKKAELVAQILHVDSKNKVQMACIKCICGLKVTAAAIFGDKMAADEEKKTDICFSDFGYDEKVPVILEIVGEENFELVLAMQEIYDIGSLAGIMKDSLYLSMARVKEYEQHGKDLRILKGVVKKYGTKEEYDTLFRTMEEGTYSAYVNSVNTKKKSRRDVKKRTRDEFYGRLKKIISKMPQNDSDVLYIKDKMEKEAFLPKQLTASNGVIPNQIHAREMKKILQNAEIYLPFLKEKDTSGLTVSERILKLFSFQIPYYVGPVSEKSKLNGGNGWVVRKEEGAVLPWNIEEKIDMTATSREFVERMVRRCSYLSDERVLPKGSLLYERFCVLNEINAIKVDGVKIPVEIKQDLYSKYFKKGKKVTKKKIAEFLIARGVIKEDQTELISGIDIAVNSTLSTYAKFYAIFGEKMEQDSYKKMVEQIVEWCTIYGDAKKFLEQKIKECYGNILTQEEIKRITGFKFRDWGRLSKEFLELSGCSKATGEVMPLISMMWETNDNLMELLDDNYYTYREALEEKQNNAFKLLADIEPEDLDEMYFSAPVKRMVWQTLCIIKELEKVLGKAPKRLFVEMTRNEQKDKKRTDSRKQQFLDLYKNIKDESRDWKELITRADENGTLKSKKMYLYLTQRGRCMYTGHPIDLEDLFKDNRYDIDHIYPRHFVKDDNIMNNLVLVEKEKNAHKSDNYPLEEEIYKKQLPMWKDLHQRKLITDEKFKRLTGRNEFTDEQKAGFIARQLVETSQGTKGVTTILERALPDTKIVYAKASNVSEFRQKRDLLKSRVVNDFHHAQDAYLNIVVGNVYFVKFTQNPLHFIKAEYDKNKAQYEYNLSRMFDRDVRRGNETAWIGCKKGEEAGTILTVKKMMAKNTPMLTRLSFEGKGGLADQTLYSAEKAKGNGYIPLKTSDSKMQDVTKYGGFNSVSTAYFFLVEHELKGKKVRTLETVPIIWRDRIEKDETMLLKYCTDVLELKNPSIRVKKIKLQSYIKKDGYYMYITGKTNKQITTKNAVELCVNQRWIDYIKIIEKTVEKKKEECEEIDYDKNVEFYDLLLTKHTQEIFSNRPNPVGAKLKQGRDKFVSLTLLEQCRVLYEILQLSIIGNTRADLQLIGGAAISGVMLLSKNITDSKEFILINQSVTGLFEQKVDLLTV

SEQ ID NO: 3128 - protein, 1365 aa, unidentified
  REGION 1..1365: note = Description of Unknown: uncultivated organism sequence
  REGION 1..1365: note = Category: MG91 effectors
  REGION 1..1365: note = Description: MG91-320 effector
MGDKKYYLGLDMGTNSVGWAVTDEKYCLLKAKGKDLWGIREFDEASTAVDRRMHRVSRRRRQRQVVRIGLLKDYFSDQIEKVDPYFYQRLENSKYYLEDKDEQVKDKNALFNDPGFNDRDYFKNYPTIFHLRKELIENPAPHDVRLVFLALLNMFKHRGHFLNAGLDSEGDSLGNMSEIYREFAEITADDLDFPIETKGEKIEDILSSRDHSRSVKSEMLIELFGFDKKDKKRREFVRAICGLKTDTTKLFGDDQGFSSEEKTEFSFSDAAYDEKVPDIVSIIGEDRYYILELMKAIYDKGTLSEILKGSDYLSQARVASYNKHSDDLLRMKKVVRKYGSPEEYDFFFRSTEDGSYSSYVGTVNSGKKKRRSMKGDFISETNKYMTKLKKDHEDDQEIDTILNDIALENFMPKQLTSSNGIIPYQVHLKEMKKILGNAEGYLPFLIEKDESGLSVSERIIQLFSFQIPYYVGPITSKSQSDGGNGWVVRKDEGTVLPWNIHDKIDMEKTQEEFIKKLIRKCTYISGETVLPKCSLLYEKFSVLNEINNLRIDNERIDPELKQDIYNDLFLAGKAVTKKQLMKYLMNRGLITQADQVSGADITSESNARFNSALSSYGKFISIFGSDKMKEDQYQEMAEHIIYLVTIFGDSKSVLRDYLKREYGTVLNEEQIKKITGMKFRDWGRLSKAFLELHGCNKADGESKSIVRAMWDNNLNLMELINSDEYTYKDELFEKTNVQTKCLAEFKAEDLDEYYFSAPVKRMIWQTVLLIKEIEYIMGGAPDRVFIEMTRKPEDKPTRKDSRKKKFMDLYSNIKEEQKYWKDLIETSDSNGTIRSKKMFLYLTQMGRDMYTGKQIELDRLFDDNLYDIDHIYPRHFVKDDNLQNNLVLVDKRKNARKSDNYPLEKEISSNPEVVALWKTLHEKKLITDEKYRRLTGRTPFTDEQKAGFIARQLVETGQGTKGVADILKMLLPKDTTIVYAKASNASEFRHKFDLPKSRLVNDFHHANDAYLNIVVGNVYYTKFTQNPLNYIKNEYRKNSQNAEYNLDKMFDRDVIRGDQIAWKASKKDGEAGTITTVKKMMQKNTPLLTRYSFVAHGGITRKDTIWGKEVAKTEGYIPLKASDKKLKDVTKYGGFNNVSGAYFFLVEYEKKRKKERSLEVVPIYLVDRFENNVSELEKYCREELGLANASVRMSKIRIQSLISIDGYRLHISGKSENRILLRNACSMCLNTDWIKYIQKIEKYVETEVLDEEILNKQKNERLYNILKEKHLYQIYSYRPNSIGEKLEKAEVIFCGLDVKKQCSALYQLLQLTSIGPAIGDLTLLKESKNSGTMRMSKNISGNKDLYLINQSVTGVYENKIDLLTV

SEQ ID NO: 3129 - protein, 1359 aa, unidentified
  REGION 1..1359: note = Description of Unknown: uncultivated organism sequence
  REGION 1..1359: note = Category: MG91 effectors
  REGION 1..1359: note = Description: MG91-321 effector
MRETGKDYYLGLDMGTNSVGWAVTDENYVLMRAKGKDLWGIREFDEALTAVDRRTHRVARRRRQRETARIGLLKEYFHDAIAEVDPDFYQRLDNSKYHEEDKDSAVKGKNGIFNDANYNDKDYFKQYPTIFHLRKELIESTEKHDVRLVYLALLNMFKHRGHFLNAGLSTESENTMDTAYHNFVETAAQTIECNFMETVDIEKIKEILGSRDYSRSKKAELVAQLLHVDSKNKVQMACIKCICGLKVTAAAIFGDKMAADEEKKTDICFSDFGYDEKVPVILEIVGEENFELVLAMQEIYDIGSLAGIMKDSLYLSMARVKEYEQHGKDLRILKGVVKKYGTKEEYDTLFRTMEEGTYSAYVNSVNTKKKSRRDVKKRTRDEFYGRLKKIISKMPQNDSDVLYIKDKMEKEAFLPKQLTASNGVIPNQIHAREMKKILQNAEIYLPFLKEKDTSGLTVSERILKLFSFQIPYYVGPVSEKSKLNGGNGWVVRKEEGTVLPWNIEEKIDMTATSREFVERMVRRCSYLSDERVLPKGSLLYERFCVLNEINAIKVDGVKIPVEIKQDLYSKYFKKGKKVTKKKIAEFLIARGVIKEDQTELISGIDIAVNSTLSTYAKFYAIFGEKMEQDSYKKMVEQIVEWCTIYGDAKKFLEQKIKECYGNILTQEEIKRITGFKFRDWGRLSKEFLELSGCSKATGEVMPLISMMWETNDNLMELLDDNYYTYREALEEKQNNAFKLLADIEPEDLDEMYFSAPVKRMVWQTLCIIKELEKVLGKAPKRLFVEMTRNEQKDKKRTDSRKQQFLDLYKNIKDESRDWKELITRADENGTLKSKKMYLYLTQRGRCMYTGHPIDLEDLFKDNRYDIDHIYPRHFVKDDNIMNNLVLVEKEKNAHKSDNYPLEEEIYKKQLPMWKDLHQCKLITDEKFKRLTGRNEFTDEQKAGFIARQLVETSQGTKGVTTILERALPDTKIVYAKASNVSEFRQKRDLLKSRVVNDFHHAQDAYLNIVVGNVYFVKFTQNPLHFIKAEYDKNKAQYEYNLSRMFDRDVRRGNETAWIGCKKGEEAGTILTVKKMMAKNTPMLTRLSFEGKGGLADQTLYSAEKAKGNGYIPLKTSDSKMQDVTKYGGFNSVSTAYFFLVEHELKGKKVRTLETVPIIWRDRIEKDETMLLKYCTDVLELKNPSIRVKKIKLQSYIKKDGYYMYITGKTNKQITTKNAVELCVNQRWIDYIKIIEKTVEKKKEECEEIDYDKNVEFYDLLLTKHTQEIFSNRPNPVGAKLKQGRDKFVSLTLLEQCRVLYEILQLSIIGNTRADLQLIGGAAISGVMLLSKNITDSKEFILINQSVTGLFEQKVDLLTV

SEQ ID NO: 3130 - protein, 1353 aa, unidentified
  REGION 1..1353: note = Description of Unknown: uncultivated organism sequence
  REGION 1..1353: note = Category: MG91 effectors
  REGION 1..1353: note = Description: MG91-322 effector
MEKDYYLGLDMGTDSVGWAVTDENYNLIRAKGKDLWGVREFDSAKPAADRRSYRISRRRRQREQVRLGMLKSIFADAIKEKDPLFFIRLENSKYWKDDKNSKINTKNVLFDDPGYTDADYFKEFPTIFHLRLKLMNDDSGRYLSDPRFVYLACLQLFKHRGHFLSDISDETDPSDLSSTYERFKSLYCELTGYEFTEKDVAADDIMNVLSDRNLSRTAKKEKLIDVFSFSKSDSSKTECLKSICGLESDACKIFPDLKTEDIKKLSFNFSKSDYEEKSAELNESVGDEYFELISILKDIYDKGTLADILKGKKYLSEARVEDYNKHKKDLVLLKSVYRKYKTQDEYNEMFRDPTKGYGAYIGSNFTKDKKTSRRGSKSRDVFYDYLKKSLKGLEEDPDVKTIFDDIAKENFLVKQLTSSNGVIPNQVHLKELKKILSNAENYLPFLKETDESGLSASQRIISIFSFTIPYYVGPVSELSEKNGGNGWVVRKEDGKVYPWNFEDKINISETKRRFIDRLINECTYISGEKVLPKQSLIYQKFAMLNELNSVRINGERLDVEFKQKAFKELFSKGKQVTLNEFKNYLNNNGINIDEKSEISGVGKSSEMTRFNNKLSSYQVFHSVFGDKLEDKKYYDAAENIIYLGTIYADDKKTFKKAIEEKYGDFLTPDEIKRVSGLKFKDWGTLSAALFNLQGAEKSTGEVMTLIDALWNTQLNFMELINSDAFSYKEELEKYKKKGEGTIQNFKFEELNDYYFSAPVKRMIWQTVLIVREIEHVLGKPPVKMFVEVTRHDEEKEKIPPSRKDTFLSLYKNIKDESHDWKAIIEKADESGVIRSQKMYLYLSQMGRDLYTGKEIELDELFTTKYDIDHIIPQSLKKDDSILNNKVLTSKDFNNNIKQDNPLCEAIDDAHYAERKKLWDRLHNYNLINDEKYKRLTNRKGFSEEDLEGFIARQIVETSQAVLGVINIFKEIMPDTKIVFSKAKPISDFRKNEIGWLKSRTLNDYHHAHDAYLNIVVGNVYNTKFTDNPRNFIKKERQKDLNPNYHMNKVFWYNVERGGKVAWIAGEDGTKKTVLKTLAKNSELMTRQSFEQTGGLCNQQITNKDDAGSGIGYLPVKMGEDISKYGGYAKISQSYFFLVEHTFKKKRIRTIETVPAYLKSQIESDPDALKRYCAEKLGLVDPDIRLRRINYQSLAKYNGFYVTICSKTGDRFQVANAVRLTLSKEWNNYIKKLEKTEGDEEITEEKNIELYDILTDKHLNSIFLKRPNPVGENLKNGREKFVSLSKKEQVSTLNNILLFTGFASAGKADISSIGGSKNAGAMAVSKNVNNADEFILIENSVTGIYSVRKDLKTI

SEQ ID NO: 3131 - protein, 1358 aa, unidentified
  REGION 1..1358: note = Description of Unknown: uncultivated organism sequence
  REGION 1..1358: note = Category: MG91 effectors
  REGION 1..1358: note = Description: MG91-323 effector
MEKEYYLGLDMGTNSVGWAVTDDAYNLIRFKGKDMWGIREFDEANPAVERRTHRTSRRREQRNAVRMGLIRSYFADEIQKVDSNFYQRLDNSFFHVEDKQDNVKDKNGIFNDKNYKDADYYKQYPTIFHLRKELIEDAFQKDVRLVYLAVANMFKHRGHFLLSGIGSESSKQTITDLYNQVSGLITEEYGISLKTDIAGTDFEQVLCSREYSRTRKLEKVCEILEIKNSDKLKKAFVKSMCGLSVKITDVIDDTFTEISDEDKKITFSFVDSDYDEKAGVLEEKLGTDVYDIISKLKEIHDKAQVAEIMKNYQYLSFARVADYEKHKKDLKILKRVVKKYFEPTVYDKLFRSGENGTYSAYVNSFNSGEKSRRNYKERKQEDLYNSIKKLLKSIDNVCDTDIEYIKNEIEKENFLPKQLTFKNGVIPNQIHASELKAILKNAEKYLPFLNEKDESGYTVSERILMLFSFQIPYYVGPVSPNSNGWVKRLEPGQVLPWNIDKKIDLKETSEQFIQRMVRNCTYIAGEKVLPKASLLYENFKVLNEINNLSINGERIAVALKQDLYNTLFLKGKRVTRKQIFNYFHSRGLVEEDSQISGIDIAVNNSLSTYGKFLPLFGEHLKEDKYKKMVDDIVFWCTVYGDSRKFLREQLEEKYSDVLDENQIKRITGMKFKDWGNLSKEFLELLGCCKSTGEMIPLIRAMWETNYNLMELLHSEEFTYSEELEEKQGKIEKVLSEYTIDDLNEEYFSAPVKRMVWQTLLIIKEIEKIMKCPPTRIFVEMTRKDDEKGDNGRKSSRKDQLLALYKKIQSEDKEWKKEMSSRIEDYDKNGALRSKKLYLYFIQKGLDMYTGKPIDLDNLMSANSNYDIDHIYPRHFVKDDNINNNLVLASKPANAEKSDIYPIKDSIYQKMKYTWKVLRDEGLITEEKYKRLTGRNPFTDEQKAGFIARQLVETGQGTKGVADLLTALLPDTKLVYSKAGNVSDFRKRYDIPKSRLINDFHHAHDAYLNIVVGNIYFTKFTSNPLNYIRKECSSKDNKYQYNLGNMYKWDVKRDGKTAWIAAKEGETGTLATVKKMLSRNTPILTRLAIEGHGGIADATLYSHKKAKQDAYIPLKSSDARMADVTKYGGYSSVTTAYLFLVEHEIKGKKIRTLETVPLYLKDRLENSKEKLEEYCRETLGYTNPSVRMKKIKLQSLIKLNGYYMQISGKTNKQFTVRNYVQFCLNSKWVDYIHKLEKYQDKGVIDDAITDEKNVELYNVLCEKHSVGIFTLRPNPVGDKIKKGYDKFVNLTTEEQIKLLIEIIKLTCVGIVSANLTLIGGASISGKMLISKNITDAKECLLINQSVTGLYENRIDLLRV

SEQ ID NO: 3132 - protein, 1358 aa, unidentified
  REGION 1..1358: note = Description of Unknown: uncultivated organism sequence
  REGION 1..1358: note = Category: MG91 effectors
  REGION 1..1358: note = Description: MG91-324 effector
MEKEYYLGLDMGTNSVGWAVTDDAYNLIRFKGKDMWGIREFDEANPAVERRTHRTSRRREQRNAVRMGLIRSYFADEIQKVDSNFYQRLDNSFFHVEDKQDNVKDKNGIFNDKNYKDADYYKQYPTIFHLRKELIEDASQKDVRLVYLAVANMFKHRGHFLLSGIGSESSKQTITDLYNQVSGLITEEYGISLKTDIAGTDFEQVLCSREYSRTRKSEKVCEILEIKNSDKLKKAFVKSMCGLSVKITDIIDDTFTEISDEDKKITFSFVDSDYDEKAGVLEEKLGTDVYDIISKLKEIHDKAQVAEIMKNYQYLSFARVADYEKHKKDLKILKRVVKKYFEPTVYDKLFRSEENGTYSAYVNSFNSGEKSRRNYKVRKQEDLYNSIKKLLKSVDNVYDTDIEYIKNEMDKENFLPKQLTFKNGVIPNQIHASELKAILKNAEKYLPFLNEKDESGYTVSERILMLFSFQIPYYVGPVSPNSNGWVKRLEPGQVLPWNIDKKIDLKETSEQFIQRMVRNCTYIAGEKVLPKASLLYENFKVLNEINNLSINGERIAVALKQDLYNTLFLKGKRVTRKQIFNYFHSRGLVEEDSQISGIDIAVNNSLSTYGKFLPLFGEHLKEDKYKKMVDDIVFWCTVYGDSRKFLREQLEEKYSDVLDENQIKRITGMKFKDWGNLSKEFLELSGCCKSTGEMIPLIRAMWETNYNLMELLHSEEFTYSEELEEKQGKIEKVLSEYTIDDLNEEYFSAPVKRMVWQTLLIIKEIEKIMKCPPTRIFVEMTRKDDEKGDNGRKSSRKDQLLALYKRIQSEDKEWKKEMSSRIEDYDKNGALRSKKLYLYFIQKGLDMYTGKPIDLDNLMSANSNYDIDHIYPRHFVKDDNINNNLVLASKPANAEKSDIYPIKDSIYQKMKYTWKVLRDEGLITEEKYKRLTGRNPFTDEQKAGFIARQLVETGQGTKGVADLLTALLPDTKLVYSKAGNVSDFRKMYDIPKSRLINDFHHAHDAYLNIVVGNIYFTKFTSNPLNYIRKECSSKDNKYQYNLGNMYKWDVKRDGKTAWIAAKEGETGTIATVKKMLSRNTHTLTRLTIEGHGGIADATLYSHKKAKQDAYIPLKSSDARMADVTKYGGYSSVTTAYLFLVEHEIKGKKIRTLETVPLYLKDRLENSKEKLEEYCRETLGYTNPSVRMKKIKLQSLIKLNGYYMQISGRTGNRFTLRNYIQLCLNGKWVDYIHKLEKYQDKGFIDNVITDEKNVELYNVLCEKHNVGIYTMRPNPVGDRIKNGYDKFVDLTIEEQIKLLIEIIKLTCVGIVSADLTLIGGAAISGKMLMSKNITDANECILINQSVTGLYENRIDLLRV

SEQ ID NO: 3133 - protein, 1358 aa, unidentified
  REGION 1..1358: note = Description of Unknown: uncultivated organism sequence
  REGION 1..1358: note = Category: MG91 effectors
  REGION 1..1358: note = Description: MG91-325 effector
MEKEYYLGLDMGTNSVGWAVTDDAYNLIRFKGKDMWGIREFDEANPAVERRTHRTSRRREQRNAVRMGLIRSYFADEIQKVDSNFYQRLDNSFFYVEDKQDNVKDKNGIFNDKNYKDANYYKQYPTIFHLRKELIEDASQKDVRLVYLAVANMFKHRGHFLLSGIGSESSKQTITDLYNQVSGLITEEYGISLKTDIAGTDFEQVLCSREYSRTRKSEKVCEILEIKNSDKLKKAFVKSMCGLSVKITDIIDDTFTEISDEDKKITFSFVDSDYDEKAGVLEEKLGTDVYDIISKLKEIHDKAQVAEIMKNYQYLSFARVADYEKHKKDLKILKRVVKKYFEPTVYDKLFRSEENGTYSAYVNSFNSEEKSRRNYKERKQEDLYNSIKKLLKSVDNVDDTDIEYIKNEMDKENFLPKQLTFKNGVIPNQIHASELKAILKNAEKYLPFLNEKDESGYTVSERILMLFSFQIPYYVGPVSSNSNGWGKRLEPGQGLPWNIDKKIDLKETSEQFIQRMVRNCTYIAGEKVLPKASLLYENFKVLNEINNLSINGERITVNLKQDLYNTLFLKGKRVTRKQIFNYFHSRGLVEEDSQISGIDIAVNNSLSTYGKFLPLFGEHLKEDKYKKMVDDIVFWCTVYGDSRKFLREQLEEKYSDVLDENQIKRITGMKFKDWGNLSKEFLELSGCCKSTGEVMPLIRAMWETNYNLMELLHSEEFTYSEELEEKQGKIEKVLSEYTIDDLNEEYFSAPVKRMVWQTLLIIKEIEKIMKCPPTRIFVEMTRKDDEKGDNGRKSSRKDQLLALYKKIQSEDKEWKKEMSSRIEDYDKNGALRSKKLYLYFIQKGLDMYTGKPIDLDNLMSANSNYDIDHIYPRHFVKDDNINNNLVLASKPANAEKSDIYPIKDSIYQKMKYTWKVLRDEGLITEEKYKRLTGRNPFTDEQKAGFIARQLVETGQGTKGVADLLTALLPDTKLVYSKAGNVSDFRKRYDIPKSRLINDFHHAHDAYLNIVVGNIYFTKFTSNPLNYIRKECSSKDNKYQYNLGNMYKWDVKRDGKTAWVAPEEGETGTLATVKKMLSRNTPILTRLTIEGHGGIADATLYSHKKAKQDTYIPLKSSDARMADVTKYGGYSSVTTAYLFLVEHEIKGKKIRTLETVPLYLKDRLENSKEKLEEYCRETLGYTNPSVRMKKIKLQSLIKLNGYYMQISGKTNKQFTVRNYVQFCLNSKWVDYIHKLEKYQDKGVIDDAITDEKNVELYNVLCEKHSVGIFTLRPNPVGDKIKKGYDKFVNLTTEEQIKLLIEIIKLTCVGIVSANLTLIGGASISGKMLISKNITDAKECLLINQSVTGLYENRIDLLRV

SEQ ID NO: 3134 - protein, 1358 aa, unidentified
  REGION 1..1358: note = Description of Unknown: uncultivated organism sequence
  REGION 1..1358: note = Category: MG91 effectors
  REGION 1..1358: note = Description: MG91-326 effector
MEKEYYLGLDMGTNSVGWAVTDDAYNLIRFKGKDMWGIREFDEANPAVERRTHRTSRRREQRNAVRMGLIRSYFADEIQKVDSNFYQRLDNSFFHVEDKQDNVKDKNGIFNDKNYKDANYYKQYPTIFHLRKELIEDVSQKDVRLVYLAVANMFKHRGHFLLSGIGSESSKQTITDLYNQVSGLITEEYGISLKTDIAGTDFEQVLCSREYSRTRKSEKVCEILEIKNSDKLKKAFVKSMCGLSVKITDVIDDTFTEISDEDKKITFSFVDSDYDEKAGVLEEKLGTDVYDIISKLKEIHDKAQVAEIMKNYQYLSFARVADYEKHKKDLKILKRVVKKYFEPTVYDKLFRSGENGTYSAYVNSFNSGEKSRRNYKERKQEDLYNSIKKLLKSIDNVCDTDIEYIKNEIEKENFLPKQLTFKNGVIPNQIHVSELKAILKNAEKYLPFLNEKDESGYTVSERILMLFSFQIPYYVGPVSPNSNGWVKRLEPGQVLPWNIDKKIDLKETSEQFIQRMVRNCTYIAGEKVLPKASLLYENFKVLNEINNLSINGERITVNLKQDLYNTLFLKGKRVTRKQIFNYFHSRGLVEEDSQISGIDIAVNNSLSTYGKFLPLFGEHLKEDKYKKMVDDIVFWCTVYGDSRKFLREQLEEKYSDVLDENQIKRITGMKFKDWGNLSKEFLELSGCCKSTGEVMPLIRAMWETNYNLMELLHSEEFTYSEELEEKQGKIEKVLSEYTIDDLNEEYFSAPVKRMVWQTLLIIKEIEKIMKCPPTRIFVEMTRKDDEKGDNGRKSSRKDQLLALYKKIQSEDKEWKKEMSSRIEDYDKNGALRSKKLYLYFIQKGLDMYTGKPIDLDNLMSANSNYDIDHIYPRHFVKDDNINNNLVLASKPANAEKSDIYPIKDSIYQKMKYTWKVLRDEGLITEEKYKRLTGRNPFTDEQKAGFIARQLVETGQGTKGVADLLTALLPDTKLVYSKAGNVSDFRKRYDIPKSRLINDFHHAHDAYLNIVVGNIYFTKFTSNPLNYIRKECSSKDNKYQYNLGNMYKWDVKRDGKTAWIAAKEGETGTLATVKKMLSRNTPILTRLAIEGHGGIADATLYSHKKAKQDAYIPLKSSDARMADVTKYGGYSSVTTAYLFLVEHEIKGKKIRTLETVPLYLKDRLENSKEKLEEYCRETLGYTNPSVRMKKIKLQSLIKLNGYYMQISGKTNKQFTVRNYVQFCLNSKWVDYIHKLEKYQDKGVIDDAITDEKNVELYNVLCEKHSVGIFTLRPNPVGDKIKKGYDKFVNLTTEEQIKLLIEIIKLTCVGIVSANLTLIGGASISGKMLISKNITDAKECLLINQSVTGLYENRIDLLRV

SEQ ID NO: 3135 - protein, 1358 aa, unidentified
  REGION 1..1358: note = Description of Unknown: uncultivated organism sequence
  REGION 1..1358: note = Category: MG91 effectors
  REGION 1..1358: note = Description: MG91-327 effector
MRETGKDYYLGLDMGTNSVGWAVTDENYVLMRAKGKDLWGIREFDEALTAVDRRTHRVARRRRQREIARIGLLKEYFHDAIAEVDPDFYQRLDNSKYHEEDKDSAVKGKNGIFNDANYNDKDYFKQYPTIFHLRKELIESTEKHDVRLVYLALLNMFKHRGHFLNAGLSTESENTMDTAYHNFVETAAQTIECNFMETVDIEKIKEILGSRDYSRSKKAELVAQILHVDSKNKVQMACIKCICGLKVTAAAIFGDKMAADEEKKTDICFSDFGYDEKVPVILEIVGEENFELVLAMQEIYDIGSLAGIMKDSLYLSMARVKEYEQHGKDLRILKGVVKKYGTKEEYDTLFRTMEEGTYSAYVNSVNTKKKSRRDVKKRTRDEFYGRLKKIISKMPQNDSDVLYIKDKMEKEAFLPKQLTASNGVIPNQIHAREMKKILQNAEIYLPFLKEKDTSGLTVSERILKLFSFQIPYYVGPVSEKSKLNGGNGWVVRKEEGTVLPWNIEEKIDMTATSREFVERMVRRCSYLSDERVLPKGSLLYERFCVLNEINAIKVDGVKIPVEIKQDLYSKYFKKGKKVTKKKNAEFLIARGVIKEDQTELISGIDIAVNSTLSTYAKFYAIFGEKMEQDSYKKMVEQIVEWCTIYGDAKKFLEQKIKECYGNVLTQEEIKRITGFKFRDWGRLSKEFLELSGCSKATGEVMPLISMMWETNDNLMELLDDNYYTYREALEEKQNNAFKLLADIEPEDLDEMYFSAPVKRMVWQTLCIIKELEKVLGKAPKRLFVEMTRNEQKDKKRTDSRKQQFLDLYKNIKDESRDWKELITRADENGTLKSKKMYLYLTQMGRCMYTGHPIDLEDLFKDNRYDIDHIYPRHFVKDDNIMNNLVLVEKEKNAHKSDNYPLEEEIYKKQLPMWKDLHQRKLITDEKFKRLTGRNEFTDEQKAGFIARQLVETSQGTKGVTTILERALPDTKIVYAKASNVSEFRQKRDLLKSRVVNDFHHAQDAYLNIVVGNVYFVKFTQNPLHFIKAEYDKNKAQYEYNLSRMFDRDVRRGNETAWIGCKKGEEAGTILTVKKMMAKNTPMLTRLSFEGKGGLADQTLYSAEKAKGNGYIPLKTSDSKMQDVTKYGGFNSVSTAYFFLVEHELKGKKVRTLETVPIIWRDRIEKDETMLLKYCTDVLELKNPSIRVKKIKLQSYIKKDGYYMYITGKTLNRIIIKNAVQMCLQQKWIVYIKNIEKAIQKKTIDATITYDANLELYNLIERKYKYEIFKNRPNPMGDKIEQGKKLFEEKSLLEQSKILYELLQLSAIGNVKADLQLIGGSASSGVMLIPKNITDSKEFILINQSVTGLFEQKVDLLTV

SEQ ID NO: 3136 - protein, 1342 aa, unidentified
  REGION 1..1342: note = Description of Unknown: uncultivated organism sequence
  REGION 1..1342: note = Category: MG91 effectors
  REGION 1..1342: note = Description: MG91-328 effector
MRYFMGLDMGTSSVGWAVTDEHYQLLRRKGKDMWGIREFEEAATAVERRTHRVSRRRRQRQVARIGLLQEYFHDAIHQVDPNFYQRLKNSKYHEEDKDEIVRESNGIFNDAEYTDKEYFKEFPTIFHLRQELIKSKEPHDVRLVYLALVNMFKHRGHFLNATLSADGESRKIKDIYTDFVDKAAEQLGVSFATDIRYEELENYLSSNDLSRKRKGELIAELLHVTRKDKQQYALIECMLGLDKSVKLMFGDTLPEDFDKTIKVNFSDIAFEEKATEISEAIGEEKYDLILIMKEIYDAAILNRIMNGYTYLSDARVAEYEKHKSDLACLKHYIKEYGTQQQFDFLFRGTEKGSYSAYVHSVNSHEKQRRNMAGNKKEDLYSALKKMLKDMPENEEKTCIMMQIELDNFLPKQLTASNGVIPNQIHLKEMKKILANAENYLPFLKEKDESGYTISERIQKLFAFQIPYYIGPTTEKSAEFGGNGWVVRKEEGKVLPWNIDQKIDMKKTSEKFISRMVRRCTYMNDEQVLPKESLEYESFCVLNELNNIKVYGEKLPVDIKQDIYRTLCEKGKRVTKKSLMQYLVGRGVIKAEDEEQLTGLMDGLNNTLKSFAKFKAIFGDAIYEDSCKKMVEQIIFWCTVYGDSKHFLKEQLLEKYGEVLTDAQIKRILGIKFRDWGNLSKKFLELQGCSKETGKVNSLIRMLWETNDNLMELLAQDSYTFKEELENMQESTYKVLTELQPEDLDHMYFSAPVKRMIWQTILIIKEVTKVMGCQPERLFIEMTREHGQKNDIKDSRAKKFYELYSKIKDEDKDWRKVIEDADKDGRIRSKKMYLYLTQMGRCMYTGRPIDLDQLFNNNLYDIDHIYPRHYVKDDNLENNMVLVEKQSNAHKSDVYPLESGIYEKQVNWWRELHRKNLINDEKLKRLTGRNPFTDEQKAGFIARQLVETSQGTKGVATILQEALPDTTLVYAKARNVSEFRSDNDLLKSRIVNDFHHAHDAYLNIVIGNVYYVKFTKNPINFIREHGTYNLGKMFAKDVKRGDDIGWVAQSGNGQTATMETIKRTMARNTPLLTRMSYEVTGGLANQTLYSASKAKEGTYIPLKSSDERMQDVTKYGGFTSVSTAYFMLVEHDGKKGKRIRTIESVPIMWKERIEKNPAELERYCLEVLKLSNPDIRVRKILIQSLIKRNGYYMQITGKTGNQLYVRNTVSLCLKQEWVNYIKKLEKGNDENITKDKNLVLYDILVDKHNNTIYSQRPNPVGEKLVKRREEFINLNLNDQVTVLLEILKLTQIALGGANLKLIGEAEKTGVMLISKDITTLDEMLLINQSVTGLYEQKVNLLTV

SEQ ID NO: 3137 - protein, 531 aa, unidentified
  REGION 1..531: note = Description of Unknown: uncultivated organism sequence
  REGION 1..531: note = Category: MG91 effectors
  REGION 1..531: note = Description: MG91-329 effector
MNEVFVLELPLRVEKYQADILNKRYEQLRQLYNYVQGKLRRQYSYFEQMKEFKACKTFKEKRDFFRSHPFYINETLKNNKTPFKVSFDEYGIKGYVEKLAQKLVGGNKSYADFGFTTLILDHLGASIWSAWNKKLYDLKAKHISYKKYDELNSFSSRRQVVHGVVYFSGIELHLDTMELSIKMNGKQGNNAKFITLKIQHNPKHADYELRALKGGLESVKVVKVVRRMVRSQYKYYVQLTIEGEKPQKGRTLGNGRVGIDLGPTTVAVSGENIVSIDKLASKCDNIQEEITRLSRKIDRSRRANNPQNFNEDGTIKRGVKLVWKKEKNLKRYSKLKRELAELRRKQAAIRKQQHIERANALLKEGDTFIVENNPVNAWVRRAKETKIDEKTGKYKSKRGSGRSVGNHAPAMFVDILENKVKSLGGRFERVNTQNAASQYDFTTDSFKTGDEKHKLNERAITLSNGDTHQRDMLAAFNLQHLKLDETKTKQYDTEAMAADYDRFCKLEREEIQRYKNKEKKDDRSTIGAEKL

SEQ ID NO: 3138 - protein, 1352 aa, unidentified
  REGION 1..1352: note = Description of Unknown: uncultivated organism sequence
  REGION 1..1352: note = Category: MG91 effectors
  REGION 1..1352: note = Description: MG91-330 effector
MTAFKYYLGLDMGTNSMGWAATDPEYRLLKAKGKDLWGIREFNEASGAVERRTHRISRRRRQREQVRIGILKDYFHDAICEVDPGFFRRLENSKYHEEDKDVEVRYKNNIFNDSNYTDKDYFNEYPTIYHLRNELISSTEKHDVRLVFLALLNMFKHRGHFLNAGLGENNGESNIDNAYFELTELLSELTEYHLSQDIDCKQIEAILSRRDMSRTHKAEELAGVLHVDLKNKPYKELIRGLCGLKFNACVVFPDVQSEEVTKLDICLSESTFDEKSDEIANIIGEDYFEIIMAMKEMFDIGSLASIMKGHNYLSQARVASYTKHKEDLKLLKEVIKKYCGKKEYDKFFNSDADGSYASYVGSYNSKNKERRVGNKRTSEELYKEIKKLLKDAQKEDENVQKILTSIENETFLPKQLTASNGVIPNQVHAREMKKILSNAENYLPFLTEKDETGLSVSERILKLFTFQIPYYVGPTSENSGKNGGNGWVVRREDGQVLPWNIDEKIDMKATSEAFISRMVRRCTYISGEQVLPKASLEYQSYCVLNEINNIKIDGERISVELKQDIYKAVFQKGKKVTKKQLCKYLHTRGIIETEEQVTGVDVSINNALTTYGKFKPIFGEDISKDSVQKMIEDIVFWCTVYGDSKKFLKDRIEEKYGNKLSEEQIKRILGFKFKDWGNLSKKFLELNGADTSTGESISIIRALWNNNLNLMELINSSLYNYKECLAEYQNTMLKTLSEIEAEDLNEYYFSAPVRRMIWQTILVIKELVKVLGCEPERIFVEMTRKPDEHKTRTSSRRNKFEELYKKVKDETTDWMQVIANAEEDGKIRSKKMYLYLTQKGRCMYTGKHIELDDLFDNNLYDIDHIYPRHFVKDDNIDNNLVLVCKEKNAHKSDHYPIEEEIFLSQKKMWLELRKSGFITEEKYNRLMGRNPFSDEQKAGFIARQLVETSQGTKGVANILRQLLPGSKIVYAKASNVSEFRRTRDDIPKSRLVNDFHHAHDAYLNIVVGNVYYVKFTQNPLNFIKKDYDNYKEDYNLSKMFDWDVKRNGEVAWIAQRKDGEAGTITTVKKMLSRNTPLMTRYSFEGKGGLANETLYSAKKAKGEGYIPFKSSDDKMQDVTKYGGFTSVTGAYFFLVEHAEKKKRIRTIESVPVYLAQKIEQNPDELKKYCEEILGLIDADIRLKKIKIGSLIKRNGYFCYITGKTGKQLIVRNAVNLCLKNEWIKYISKLEKVKEKDAVDKIITKEKNEVLYSELIQKFKHGIFSKRPNPVGDKLEKGSEKFSNLSIKEQCTVLCQILQLAAVLGSECDMTLLGESAHCGKMLISKKIGDEEIYLINQSVTGLYEKKINLHTV

SEQ ID NO: 3139 - protein, 1358 aa, unidentified
  REGION 1..1358: note = Description of Unknown: uncultivated organism sequence
  REGION 1..1358: note = Category: MG91 effectors
  REGION 1..1358: note = Description: MG91-331 effector
MEKEYYLGLDMGTNSVGWAVTDDAYNLIRFKGKDMWGIREFDEANPAVERRTHRTSRRREQRNAVRMGLIRSYFADEIQKVDSNFYQRLDNSFFHVEDKQDNVKDKNGIFNDKNYKDADYYKQYPTIFHLRKELIEDASQKDVRLVYLAVANMFKHRGHFLLSGIGSESSKQTITDLYNQVSGLITEEYGISLKTDIAGTDFEQVLCSREYSRTRKSEKVCEILEIKNSDKLKKAFVKSMCGLSVKITDVIDDTFTEISDEDKKITFSFVDSDYDEKAGVLEEKLGTDVYDIISKLKEIHDKAQVAEIMKNYQYLSFARVADYEKHKKDLKILKRVVKKYFEPTVYDKLFRSGENGTYSAYVNSFNSGEKSRRNYKERKQEDLYNSIKKLLKSIDNVCDTDIEYIKNEIEKENFLPKQLTFKNGVIPNQIHVSELKAILKNAEKYLPFLNEKDESGYTVSERILMLFSFQIPYYVGPVSPNSNGWVKRLEPGQVLPWNIDKKIDLKETSEQFIQRMVRNCTYIAGEKVLPKASLLYENFKVLNEINNLSINGERIAVALKQDLYNTLFLKGKRVTRKQIFNYFHSRGLVEEDSQISGIDIAVNNSLSTYGKFLPLFGEHLKEDKYKKMVDDIVFWCTVYGDSRKFLREQLEEKYSDVLDENQIKRITGMKFKDWGNLSKEFLELLGCCKSTGEMIPLIRAMWEINYNLMELLHSEEFTYSEELEEKQGKIEKVLSEYTIDDLNEEYFSAPVKRMVWQTLLIIKEIEKIMKCPPTRIFVEMTRKDDEKGDNGRKSSRKDQLLALYKKIQSEDKEWKKEMSLRIEDYDKNGALRSKKLYLYFIQKGLDMYTGKPIDLDNLMSANSNYDIDHIYPRHFVKDDNINNNLVLASKPANAEKSDIYPIKDSIYQKMKYTWKVLRDEGLITEEKYKRLTGRNPFTDEQKAGFIARQLVETGQGTKGVADLLTALLPDTKLVYSKAGNVSDFRKRYDIPKSRLINDFHHAHDAYLNIVVGNIYFTKFTSNPLNYIRKECSSKDNKYQYNLGNMYKWDVKRDGKTAWIAAKEGETGTIATVKKILSRNTPTLTRLTIEGHGGIADATLYSHKKAKQDAYIPLKSSDARMADVTKYGGYSSVTTAYLFLVEHEIKGKKIRTLETVPLYLKDRLENSKEKLEEYCRESLGYTNPSVRMKKIKLQSLIKLNGYYMQISGKSIKQFEVRNYVQICLNGKWVDYIHKLEKYQDKGVIDNAITDEKNVELYNILCEKHSVGIFTLRPNPVGDKIKKGYDKFVNLTTEEQIKLLIEIIKLTCVGIVKADLRLIGASEKSGTMKINKNITDAKECFLINQSVTGLYENRIDLLRV

SEQ ID NO: 3140 - protein, 1352 aa, unidentified
  REGION 1..1352: note = Description of Unknown: uncultivated organism sequence
  REGION 1..1352: note = Category: MG91 effectors
  REGION 1..1352: note = Description: MG91-332 effector
MTAFKYYLGLDMGTNSVGWAATDPEYRLLKAKGKDLWGIREFNEASGAVERRTHRISRRRKQREQVRIGILKDYFHDAICEVDPSFFQRLENSKYHEEDKDVEVRYKNNIFNDSNYTDKDYFNEYPTIYHLRNELISSTEKHDVRLVFLALLNMFKHRGHFLNAGLGENNGESNIDNAYFELTELLSELTEYHLSQDIDCKQIEAILSRRDMSRTHKAEELAGVLHVDLKNKPYKELIRGLCGLKFNACVVFPDVQSEEVTKLDICLSESTFDEKSDEIANIIGEDYFEIIMAMKEMFDIGSLASIMKGHNYLSQARVASYTKHKEDLKLLKEVIKKYCGKKEYDKFFNSDADGSYASYVGSYNSKNKERRVGNKRTSEELYKEIKKLLKDAQKEDENVQKILTSIENETFLPKQLTASNGVIPNQVHAREMKKILSNAENYLPFLTEKDETGLSVSERILKLFTFQIPYYVGPTSENSGKNGGNGWVVRREDGQVLPWNIDEKIDMKATSEAFISRMVRRCTYISGEQVLPKASLEYQSYCVLNEINNIKIDGERISVELKQDIYKAVFQKGKKVTKKQLCKYLHTRGIIETEEQVTGVDVSINNALTTYGKFKPIFGEDISKDSVQKMIEDIVFWCTVYGDSKKFLKDRIEEKYGNKLSEEQIKRILGFKFKDWGNLSKKFLELNGADTSTGESISIIRALWNNNLNLMELINSSLYNYKECLAEYQNTMLKTLSEIEAEDLNEYYFSAPVRRMIWQTILVIKELVKVLGCEPERIFVEMTRRPDEHKTRTSSRRNKFEELYKKVKDETTDWMQVIANAEEDGKIRSKKMYLYLTQKGRCMYTGKHIELDDLFDNNLYDIDHIYPRHFVKDDNIDNNLVLVCKEKNAHKSDHYPIEEEIFLSQKKMWLELRKSGFITEEKYNRLMDRNPFSDEQKAGFIARQLVETSQGTKGVANILRQLLPGSKIVYAKASNVSEFRCTRDDIPKSRLVNDFHHAHDAYLNIVVGNVYYVKFTQNPLNFIKKDYDKYKEDYNLSKMFDWDVKRNGEVAWIAQRKDGAAGTITTVKRMLSRNTPLMTRYSFDGKGGLTNETLYSAKKAKGEGYIPFKSSDDKMQDVTKYGGFTSVTGAYFFLVEHTEKKKRIRTIESVPVYLAQKIEQNPDELKKYCEEILGLIDADIRLKKIKIGSLIKRNGYFCYITGKTGNRLIVRNAVNLCLKNEWIKYISKLEKVKEKDAVDKIITKEKNEVLYSELIQKFKHGIFSKRPNPVGDKLEKDSEKFNNLSIKDQCAVLCQVLRMAAILGSECDMTLLGDSPNCGKMLISKKIGDEEIYLINQSVTGLYEKKINLHTV

SEQ ID NO: 3141 - protein, 1359 aa, unidentified
  REGION 1..1359: note = Description of Unknown: uncultivated organism sequence
  REGION 1..1359: note = Category: MG91 effectors
  REGION 1..1359: note = Description: MG91-333 effector
MLEKPYYLGLDMGTNSVGWAVTDQQYNLLKAKGKDLWGIREFAEADTSVERRTHRISRRRRQREQARIGLLNDYFHDAIIAIDPSFFQRLENSKYHLEDKDQNVRYKYNIFNDPDYTDADYYTQYPTIYHLRKELLENPKPHDVRLVYLALLNMFKHRGHFLNSGISDGNNERSLKDAYINFAISVSELTEDYFNQDVDYSTIEGILSSRDLNRTKKAEELSTVLGIDFKNKKYKEYLRAICGLKINAYTLFSDQLLDDTTKIDLCVSDASFDEKSEELVSLIGEDLFQIILNIKEIYDIGSLAGILKGYTYLSQARVAAYDKHKHDLKLLKSSIKKYCTKEEYNNFFNSDADGSYASYIGSFNSGNKERRVGSKRTSEDLYKEIKKLLKGANKSDPAINEIFTSIETESFLPKQLTASNGIIPNQVHSKEMARILTNAENYLPFLKETDENNLSISNRILQLYKFQIPYYIGPVTEKSQRDGGNGWVIRKDNGRVFPWNIEEKIDVKATSEAFISRMVRRCTYMNGKQVLPKASLEYESFRVLNEINNLRIDGERIPVTLKQDIYTDLFQKGKKVTKKQLCNYLATRGLIESSEQVTGIDIAINNSLSTYGKFKAIFGEDIKLDHIQHMIEDIVFWCTVYGDSKQFLKEQIEDKYKGKLSPEQMKRILGFKFKDWGNLSKEFFELKGADKSTGEAVSIIRALWENNLNLMELINSPEFDFKEQLADYEANSLKTLSDFEPEDLNDYYFSAPVRRMIWQTTLIIKELVHVLGKEPARIFIEMTREKDASRGRTLSRKKKFEDLYKNVKDENTDWAKVIEHADESGTIRSKKMYLYLTQKGRCMYTGNHIELSDLFNDNLYDIDHIYPRHFVKDDNIDNNLVLVTKEKNAHKSDNYPLEAEIFNKQRNMWTQLRKEGFISEEKYNRLMGRNAFTDEQKAGFIARQLVETSQGTKGVAELFHQLLPNSKIVCAKAGNVSDFRRNRELPKSRLVNDFHHAHDAYLNIVVGNVYYVKFTQNPINYIKNSYNKDMNKNNYNLSRMFDWDVKRGDEVAWIAQKQDGATGTISTVKKMLSKNTPLMTRLSYEGKGALANETLYSAEKAKGEGYIPFKSSDTKIQDVTKYGGFTSVTGAYFFLVEHDEKKKRIRTIESVPLYLADKIDKDSSELERYCDKLGLVNYDIRVRKIKIGSLLNRNGYFAYLTGKTGKQLILRNATNLCLDKKWTRYIKKIEKYKETNVLDSIITSETMVNLYNELLNKFTVGIYGRRPNPIGEKMDSAKNTFTSYTLDNQCNLIYQILQLSKILGFETDLSLLRTNKQSGKPTREGGMQISKKIDNTTSMYLINQSPTGLFETKIDLQTI

SEQ ID NO: 3142 - protein, 1352 aa, unidentified
  REGION 1..1352: note = Description of Unknown: uncultivated organism sequence
  REGION 1..1352: note = Category: MG91 effectors
  REGION 1..1352: note = Description: MG91-334 effector
MTAFKYYLGLDMGTNSVGWAATDPEYRLLKAKGKDLWGIREFNEASGAVERRTHRISRRRRQREQVRIGILKDYFHDAICEVDPSFFRRLENSKYHEEDKDVEVRYKNNIFNDGNYTDKDYFNEYPTIYHLRNELISSTEKHDVRLVFLALLNMFKHRGHFLNAGLGENNGESNIDNAYFELTELLSELTEYHLSQDIDCKQIEAILSRRDMSRTHKAEELAGVLHVDLKNKPYKELIRGLCGLKFNACVVFPDVQSEEVTKLDICLSESSFDEKSDEIANIIGEDYFEIIMAMKEMFDIGSLASIMKGHNYLSQARVASYTKHKEDLKLLKEVIKKYCGKKEYDKFFNSDADGSYASYVGSYNSKNKERRVGNKRTSEELYKEIKKLLKDAPKEDENVQKILTSIENETFLPKQLTASNGVIPNQVHAREMKKILSNAENYLPFLTEKDETGLSVSERILKLFTFQIPYYVGPTSENSGKNGGNGWVVRREDGQVLPWNIDEKIDMKATSEAFISRMVRRCTYISGEQVLPKASLEYQSYCVLNEINNIKIDGERISVELKQDIYKAVFQKGKKVTKKQLCKYLHTRGIIETEEQVTGVDVSINNALTTYGKFKPIFGEDISKDSVQKMIEDIVFWCTVYGDSKKFLKDRIEEKYGNKLSEEQIKRILGFKFKDWGNLSKKFLELNGADTSTGESISIIRALWNNNLNLMELINSSLYNYKECLAEYQNTMLKTLSEIEAEDLNEYYFSAPVRRIIWQTILVIKELVKVLGCEPERIFVEMTRKPDEHKTRTSSRRNKFEELYKKVKDEATDWMQVIAKAEEDGKIRSKKMYLYLTQKGRCMYTGKHIELDDLFDKNLYDIDHIYPRHFVKDDNIDNNLVLVCKEKNAHKSDHYPIEEETFLSQKKMWLELRKSGFITEEKYNRLMGRSPFSDEQKAGFIARQLVETSQGTKGVANILRQLLPGSKIVYAKASNVSEFRHTRDDIPKSRLVNDFHHAHDAYLNIVVGNVYYVKFTQNPLNFIKKDYDKYKEDYNLSKMFDWDVKRNGEVAWIAQRKDGEAGTITTVKRMLSRNTPLMTRYSFEGKGGLANETLCSAKKAKGEGYIPFKSSDDKMQDVTKYGGFTKVTGAYFFLVEHTEKKKRIRTIESVPVYLAQKIEQNPDELKKYCEEILGLVDADIRLKKIKIGSLIKRNGYFCYITGKTGNRLSVRNAVNLCLKNEWIKYISKLEKVKEKDAVDEIITKEKNEVLYSELIQKFKHGIFSKRPNPVEDKLEKGSEKFSNLSIKEQCAVLCQILQLAAVLGSECDMTLLGESAHCGKMLISKKIGDEEIYLLNQSVTGLYEKKINLHTV

SEQ ID NO: 3143 - protein, 1352 aa, unidentified
  REGION 1..1352: note = Description of Unknown: uncultivated organism sequence
  REGION 1..1352: note = Category: MG91 effectors
  REGION 1..1352: note = Description: MG91-335 effector
MLEKPYYLGLDMGTNSVGWAVTDQHYNLLKAKGKDLWGIREFTEADTSVERRTHRISRRRRQREQARIGLLNDYFHDTIIAIDPSFFQRLENSKYHLEDKDQNVRYKYNIFNDPDYTDVDYYTQYPTIYHLRKELLENPKPHDVRLVYLALLNMFKRRGHFLNAGISDGNNERSLKDAYINFAISVSELTEDYFNQDVDYSAIEEILSSRDLNRTKKAEELSTVLGIDFKNKKYKEYLRAICGLKINAYTLFSDQLPDDTTKIDLCVSDASFDEKSEELVSLIGEDLFQIILNIKEIYDIGSLTGILKGYTYLSQARVAAYNKHKHDLKLLKSSIKKYCTKEEYNNFFNSDADGSYASYIGSFNSGSKERRVGSKRTSEDLYKEIKKLLKDANKSDPAINEIFTSIETESFLPKQLTASNGIIPNQVHSKEMAKILSNAENYLPFLKDTDENNLSISNRILQLYKFQIPYYIGPVTEKSQRDGGNGWVIRKDNGRVLPWNIEEKIDVKATSEAFISRMVRRCTYMNGKQVLPKASLEYESFRVLNEINNLRIDGERIPVALKQDIYTDLFQKGKKVTKKQLCNYLVTRGLIESSEQVTGIDIAINNSLSTYGKFKAILGEDIKLDHIQHMIEDIVFWCTVYGDSKQFLKEQIEDKYKEKLSPEQMKRILGFKFKDWGNLSKEFFELKGADKSTGEAISIIRALWDNNLNLMELINSPEFDFKERLTDYQTNSLKTLSDFEPEDLNEYYFSAPVRRMIWQTTLIIKELVHVLGKEPDRIFIEMTREKDASRGRTLSRKKKFEDLYKNVKDENTDWAKVIEHANESGTIRSKKMYLYLTQKGRCMYTGKHIELSDLFNDNLYDIDHIYPRHFVKDDNIDNNLVLVTKEKNAHKSDNYPLEAEIFNKQRNMWTQLRKEGFISEEKYNRLMGRNAFTDEQKAGFIARQLVETSQGTKGVAELFHQLLPNSKIVYAKAGNVSDFRRNRELPKSRLVNDFHHAHDAYLNIVVGNVYYVKFTQNPINYIKNSYNKDMNKNNYNLSRMFDWDVKRGDEVAWIAQKKDGAAGTISTVKKMLSRNTPLMTRLSYEGKGALANETLYSAEKAKGEGYIPFKSSDAKIQDVTKYGGFTSVTGAYFFLVEHDEKKKRIRTIESVPLYLANKIEKDSSELERYCDKLGLINYDIRVRKIKIGSLLNRNGYFAYLTGKTGKQLILRNATNLCLDKKWTIYIKKIEKYKEANVLDSIITSEENIKLYNELLNKFTVGIYGRRPNPIGEKMDSARDKFASLSIENQCLALYQILQLSAILGNESDLQLIGASTHAGKMLISKKIGTDEIYLINQSPTGLFETKIDLQTI

SEQ ID NO: 3144 - protein, 1331 aa, unidentified
  REGION 1..1331: note = Description of Unknown: uncultivated organism sequence
  REGION 1..1331: note = Category: MG91 effectors
  REGION 1..1331: note = Description: MG91-336 effector
MRYFMGLDMGTSSVGWAVTDEHYQLLRRKGKDMWGIREFEEAATAVERRTHRVSRRRRQRQVARIGLLQEYFHDAIHQVDPNFYQRLKNSKYHEEDKDEIVRESNGIFNDAEYTDKEYFKEFPTIFHLRQELIKSKEPHDVRLVYLALLNMFKHRGHFLNATLSADGESRKIKDIYTDFVDKAAEQLGVSFATDIRYEELENYLSSNDLSRKRKGELIAELLHVTRKDKQQYALIECMLGLDKSVKLMFGDTLPEDFDKTIKVNFSDIAFEEKATEISEAIGEEKYDLILIMKEIYDAAILNRIMNGYTYLSDARVAEYEKHKSDLACLKHYIKEYGTQQQFDFLFRGTEKGSYSAYVHSVNSHEKQRRNMAGNKKEDLYSALKKMLKDMPENEEKTCIMMQIELDNFLPKQLTASNGVIPNQIHLKEMKKILANAENYLPFLKEKDESGYTVSERIQKLFAFQIPYYIGPTTEKSAEFGGNGWVVRKEEGKVLPWNIDQKIDMKKTSEKFISRMVRRCTYMNDEQVLPKESLEYESFCVLNELNNIKVYGEKLPVDIKQDIYRTLCEKGKRVTKKSLMQYLVGRGVIKAEDEEQLTGLMDGLNNTLKSFAKFKAIFGDAIYEDSCKKMVEQIIFWCTVYGDSKHFLKEQLLEKYGEVLTGAQIKRILGIKFRDWGNLSKKFLELQGCSKETGEVNSLIRMLWETNDNLMELLAQDSYTFKEELENMQESTYKVLTELQPEDLDHMYFSAPVKRMIWQTILIIKEVTKVMGCQPERLFIEMTREHGQKNDIKDSRAKKFYELYSKIKDEDKDWRKVIEDADKDGRIRSKKMYLYLTQMGRCMYTGRPIDLDQLFNNNLYDIDHIYPRHYVKDDNLENNMVLVEKQSNAHKSDVYPLESGIYEKQVNWWRELHRKNLINDEKLKRLTGRNPFTDEQKAGFIARQLVETSQGTKGVATILQEALPDTTLVYAKARNVSEFRSDNDLLKSRIVNDFHHAHDAYLNIVIGNVYYVKFTKNPINFIREHGTYNLGKMFAKDVKRGDDIGWVAQSGNGQTATMETIKRTMARNTPLLTRMSYEVTGGLANQTLYSASKAKEGTYIPLKSSDERMQDVTKYGGFTSVSTAYFMLVEHDGKKGKRIRTIESVPIMWKERIEKNPAELERYCLDVLKLSNPDIRVRKILIQSLIKRNGYYMQITGKTGNRMYVRNMVSLCLVQDWVNYIKKLEKDKDENISKEKNINTIYNTRPNPVGDLLIKRRSDFIELKITDQVIILLEILKLTQTALGSANLKLIGEAEKTGVMLISKDITALDEMLLINQSVTGLYEQRVNLLTV

SEQ ID NO: 3145 - protein, 1358 aa, unidentified
  REGION 1..1358: note = Description of Unknown: uncultivated organism sequence
  REGION 1..1358: note = Category: MG91 effectors
  REGION 1..1358: note = Description: MG91-337 effector
MEKEYYLGLDMGTNSVGWAVTDDAYNLIRFKGKDMWGIREFDEANPAVERRTHRTSRRREQRNAVRMGLIRSYFADEIQKVDSNFYQRLDNSFFHVEDKQDNVKDKNGIFNDKNYKDADYYKQYPTIFHLRKELIEDASQKDVRLVYLAVANMFKHRGHFLLSGIGSESSKQTITDLYNQVSGLITEEYGISLKTDIAGTDFEQVLCSREYSRTRKSEKVCEILEIKNSDKLKKAFVKSMCGLSVKITDVIDDTFTEISDEDKKITFSFVDSDYDEKAGVLEEKLGTDVYDIISKLKEIHDKAQVAEIMKNYQYLSFARVADYEKHKKDLKILKRVVKKYFEPTVYDKLFRSGENGTYSAYVNSFNSGEKSRRNYKERKQEDLYNSIKKLLKSIDNVCDTDIEYIKNEIEKENFLPKQLTFKNGVIPNQIHASELKAILKNAEKYLPFLNEKDESGYTVSERILMLFSFQIPYYVGPVSSNSNGWVKRLEPGQVLPWNIDKKIDLKETSEQFIQRMVRNCTYIAGEKVLPKASLLYENFKVLNEINNLSINGERIAVALKQDLYNTLFLKGKRVTRKQIFNYFHSRGLVEEDSQISGIDIAVNNSLSTYGKFLPLFGEHLKEDKYKKMVDDIVFWCTVYGDSRKFLREQLEEKYSDVLDENQIKRITGMKFKDWGNLSKEFLELLGCCKSTGEMIPLIRAMWETNYNLMELLHSEEFTYSEELEEKQGKIEKVLSEYTIDDLNEEYFSAPVKRMVWQTLLIIKEIEKIMKCPPTRIFVEMTRKDDEKGDNGRKSSRKDQLLALYKKIQSEDKEWKKEMSSRIEDYDKNGALRSKKLYLYFIQKGLDMYTGKPIDLDNLMSANSNYDIDHIYPRHFVKDDNINNNLVLASKPANAEKSDIYPIKDSIYQKMKYTWKVLRDEGLITEEKYKRLTGRNPFTDEQKAGFIARQLVETGQGTKGVADLLTALLPDTKLVYSKAGNVSDFRKRYDIHKSRLINDFHHAHDAYLNIVVGNIYFTKFTSNPLNYIRKECSSKDNKYQYNLGNMYKWDVKRDGKTAWIAAKEGETGTIATVKKILSRNTPTLTRLTIEGHGGIADATLYSHKKAKQDAYIPLKSSDARMADVTKYGGYSSVTTAYLFLVEHEIKGKKIRTLETVPLYLKDRLENSKEKLEEYCRESLGYTNPSVRMKKIKLQSLIKLNGYYMQISGKSIKQFEVRNYVQICLNGKWVDYIHKLEKYQDKGVIDNAITDEKNVELYNILCEKHSVGIFTLRPNPVGDKIKKGYDKFVNLTTEEQIKLLIEIIKLTCVGIVKADLRLIGASEKSGTMKINKNITDAKECFLINQSVTGLYENRIDLLRV

SEQ ID NO: 3146 - protein, 1358 aa, unidentified
  REGION 1..1358: note = Description of Unknown: uncultivated organism sequence
  REGION 1..1358: note = Category: MG91 effectors
  REGION 1..1358: note = Description: MG91-338 effector
MEKEYYLGLDMGTNSVGWAVTDDAYNLIRFKGKDMWGIREFDEANPAVERRTHRTSRRRKQRNAVRMGLIRSYFADEIQKVDSNFYQRLDNSFFHVEDKQDNVKDKNGIFNDKNYKDADYYKQYPTIFHLRKELIEDASQKDVRLVYLAVANMFKHRGHFLLSGIGSESSKQTITDLYNQVSGLITEEYGISLKTDIAGTDFEQVLCSREYSRTRKSEKVCEILEIKNSDKLKKAFVKSMCGLSVKITDIIDDTFTEISDEDKKITFSFVDSDYDEKAGVLEEKLGTDVYDIISKLKEIHDKAQVAEIMKNYQYLSFARVADYEKHKKDLKILKRVVKKYFEPTVYDKLFRSEENGTYSAYVNSFNSEEKSRRNYKERKQEDLYNSIKKLLKSVDNVDDTDIEYIKNEMDKENFLPKQLTFKNGVIPNQIHASELKAILKNAEKYLPFLNEKDESGYTVSERILMLFSFQIPYYVGPVSSNSNGWVKRLEPGQVLPWNIDKKIDLKETSEQFIQRMVRNCTYIAGEKVLPKASLLYENFKVLNEINNLSINGERITVNLKQDLYNTLFLKGKRVTRKQIFNYFHSRGLVEEDSQISGIDIAVNNSLSTYGKFLPLFGEHLKEDKYKKMVDDIVFWCTVYGDSRKFLREQLEEKYSDVLDENQIKRITGMKFKDWGNLSKEFLELSGCCKSTGEVMPLIRAMWETNYNLMELLHGEEFTYSEELEEKQGKIEKVLSEYTIDDLNEEYFSAPVKRMVWQTLLIIKEIEKIMKCPPTRIFVEMTRKDDEKGDNGRKSSRKDQLLALYKKIQSEDKEWKKEMSSRIEDYDKNGALRSKKLYLYFIQKGLDMYTGKPIDLDNLMSANSNYDIDHIYPRHFVKDDNINNNLVLASKPANAEKSDIYPIKDSIYQKMKYTWKVLRDEGLITEEKYKRLTGRNPFTDEQKAGFIARQLVETGQGTKGVADLLTALLPDTKLVYSKAGNVSDFRKRYDIPKSRLINDFHHAHDAYLNIVVGNIYFTKFTSNPLNYIRKECSSKDNKYQYNLGNMYKWDVKRDGKTAWVAPEEGETGTLATVKKMLSRNTPILTRLTIEGHGGIADATLYSHKKAKQDTYIPLKSSDARMADVTKYGGYSSVTTAYLFLVEHEIKGKKIRTLETVPIYLKDRLENSKEKLEEYCRETLGYTNPSVRMKKIKLQSLIKLNGYYMQISGRTGNRFTLRNYVQLCLNGKWVDYIHKLEKYQDKGVIDDLITDERNVELYNVLCEKHSVGIFTLRPNLVGDKIKNGYDKFVNLTTEEQIKLLIEIIKLTCVGIVSANLTLIGGAAISGKMLMSKNITYANECILINQSVTGLYENRIDLLRV

SEQ ID NO: 3147 - protein, 1352 aa, unidentified
  REGION 1..1352: note = Description of Unknown: uncultivated organism sequence
  REGION 1..1352: note = Category: MG91 effectors
  REGION 1..1352: note = Description: MG91-339 effector
MTAFKYYLGLDMGTNSVGWAATDPEYRLLKAKGKDLWGIREFNEASGAVERRTHRISRRRKQREQVRIGILKDYFHDAICEVDPSFFQRLENSKYHEEDKDVEVRYKNNIFNDGNYTDKDYFNEYPTIYHLRNELISSTEKHDVRLVFLALLNMFKHRGHFLNAGLGENNGESNIDNAYFELTELLSELTEYHLSQDIDCKQIEAILSRRDMSRTHKAEELAGVLHVDLKNKPYKELIRGLCGLKFNACVVFPDVQSEEVTKLDICLSESTFDEKSDEIANIIGEDYFEIIMAMKEMFDIGSLASIMKGHNYLSQARVASYTKHKEDLKLLKEVIKKYCGKKEYDKFFNSDADGSYASYVGSYNSKNKERRVGNKRTSEELYKEIKKLLKDAQKEDENIQKILTSIENETFLPKQLTASNGVIPNQVHAREMKKILSNAENYLPFLTEKDETGLSVSERILKLFTFQIPYYVGPTSENSGKNGGNGWVVRREDGQVLPWNIDEKIDMKATSEAFISRMVRRCTYISGEQVLPKASLEYQSYCVLNEINNIKIDGERISVELKQDIYKAVFQKGKKVTKKQLCKYLHTRGIIETEEQVTGVDVSINNALTTYGKFKPIFGEDISKDSVQKMIEDIVFWCTVYGDSKKFLKDRIEEKYGNKLSEEQIKRILGFKFKDWGNLSKKFLELNGADTSTGESISIIRALWNNNLNLMELINSSLYNYKECLAEYQNTMLKTLSEIEAEDLNEYYFSAPVRRMIWQTILVIKELVKVLGYEPERIFVEMTRKPDEHKTRTSSRRNKFEELYKKVKDETTDWMQVIANAEEDGKIRSKKMYLYLTQKGRCMYTGKHIELDDLFDNNLYDIDHIYPRHFVKDDNIDNNLVLVCKEKNAHKSDHYPIEEEIFLSQKKMWLELRKSGFITEEKYNRLMGRSPFSDEQKAGFIARQLVETSQGTKGVANILRQLLPGSKIVYAKASNVSEFRHTRDDIPKSRLVNDFHHAHDAYLNIVVGNVYYVKFTQNPLNFIKKDYDKYKEDYNLSKMFDWDVKRNGEVAWIAQRKDGEAGTITTVKKMLSRNTPLMTRYSFEGKGGLANETLYSAKKAKGEGYIPFKSSDDKMQDVTKYGGFTKVTGAYFFLVEHTEKKKRIRTIESVPVYFVQKIEKNPGELKKYCEEILGLVDADIRLKKIKIGSLIKRNGYFCYITGKTGNRLSVRNAVNLCLKNEWIKYISKLEKVKEKDTIDEIITKEKNEVLYSELIQKFKHCIFSKRPNPVGDKLEKGSEKFSNLSIKDQCAVLCQVLRMAAILGSECDMTLLGESSICGEMKISKKIGDEEIYLINQSVTGLYEKKINLHTV

SEQ ID NO: 3148 - protein, 1358 aa, unidentified
  REGION 1..1358: note = Description of Unknown: uncultivated organism sequence
  REGION 1..1358: note = Category: MG91 effectors
  REGION 1..1358: note = Description: MG91-340 effector
MEKEYYLGLDMGTNSVGWAVTDDAYNLIRFKGKDMWGIREFDEANPAVERRTHRTSRRRKQRNAVRMGLIRSYFADEIQKVDSNFYQRLDNSFFHVEDKQDNVKDKNGIFNDKNYKDADYYKQYPTIFHLRKELIEDASQKDVRLVYLAVANMFKHRGHFLLSGIGSESSKQTITDLYNQVSGLITEEYGISLKTDIAGTDFEQVLCSREYSRTRKSEKVCEILEIKNSDKLKKAFVKSMCGLSVKITDIIDDTFTEISDEDKKITFSFVDSDYDEKAGVLEEKLGTDVYDIISKLKEIHDKAQVAEIMKNYQYLSFARVADYEKHKKDLKILKRVVKKYFEPTVYDKLFRSEENGTYSAYVNSFNSEEKSRRNYKERKQEDLYNSIKKLLKSVDNVDDTDIEYIKNEMDKENFLPKQLTFKNGVIPNQIHASELKAILKNAEKYLPFLNEKDESGYTVSERILMLFSFQIPYYVGPVSSNSNGWVKRLEPGQVLPWNIDKKIDLKETSEQFIQRMVRNCTYIAGEKVLPKASLLYENFKVLNEINNLSINGERITVNLKQDLYNTLFLKGKRVTRKQIFNYFHSRGLVEEDSQISGIDIAVNNSLSTYGKFLPLFGEHLKEDKYKKMVDDIVFWCTVYGDSRKFLREQLEEKYSDVLDENQIKRITGMKFKDWGNLSKEFLELSGCCKSTGEVMPLIRAMWETNYNLMELLHSEEFTYSEELEEKQGKIEKVLSEYTIDDLNEEYFSAPVKRMVWQTLLIIKEIEKIMKCPPTRIFVEMTRKDDEKGDNGRKSSRKDQLLALYKKIQSEDKEWKKEMSSRIEDYDKKGALRSKKLYLYFIQKGLDMYTGKPIDLDNLMSANSNYDIDHIYPRHFVKDDNINNNLVLASKPANAEKSDIYPIKDSIYQKMKYTWKVLRDEGLITEEKYKRLTGRNPFTDEQKAGFIARQLVETGQGTKGVADLLTALLPDTKLVYSKAGNVSDFRKKYDIPKSRLINDFHHAHDAYLNIVVGNIYFTKFTSNPLNYIRKECSSKDNKYQYNLGNMYKWDVKRDGKTAWIAAKEGETGTIATVKKMLSRNTPTLTRLTIEGHGGIADATLYSHKKAKQDAYIPLKSSDARMADVTKYGGYSSVTTAYLFLVEHEIKGKKIRTLETVPLYLKDRLENSKEKLEEYCRETLGYTNPSVRMKKIKLQSLIKLNGYYMQISGKTNKQFTVRNYVQFCLNSKWVDYIYKLEKYQDKGVIDDAITDEKNVELYNVLCEKHSVGIFTLRPNPVGDKIKKGYDKFVNLTTEEQIKLLIEIIKLTCVGIVSANLTLIGGASISGKMLISKNITDAKECLLINQSVTGLYENRIDLLRV

SEQ ID NO: 3149 - protein, 1352 aa, unidentified
  REGION 1..1352: note = Description of Unknown: uncultivated organism sequence
  REGION 1..1352: note = Category: MG91 effectors
  REGION 1..1352: note = Description: MG91-341 effector
MQEKPYYLGLDMGTNSVGWAVTDQHYNLLKAKGKDLWGIREFIEADTSVERRTHRISRRRRQREQARIGLLNDYFHDAIIAIDPSFFQRLENSKYHLEDKDQNVRYKYNIFNDPDYTDADYYTQYPTIYHLRKELLENPKPHDVRLVYLALLNMFKHRGHFLNSGISDGNNERSLKDAYINFAISVSELTEDYFNQDVDYSTIEGILSSRDLNRTKKAEELSTVLGIDFKNKKYKEYLRAICGLKINAYTLFSDQLPDDTTKIDLCVSDASFDEKSEELVSLIGEDLFQIILNIKEIYDIGSLAGILKGYTYLSQARVAAYDKHKHDLKLLKSSIKKYCTKEEYNNFFNSDADGSYASYIGSFNSGNKERRVGSKRTSEDLYKEIKKLLKGANKSDPAINEIFTSIETESFLPKQLTASNGIIPNQVHSKEMARILTNAENYLPFLKETDENNLSISNRILQLYKFQIPYYIGPVTEKSQRDGGNGWVIRKDNGRVFPWNIEEKIDVKATSEAFISRMVRRCTYMNGKQVLPKASLEYESFRVLNEINNLRIDGERIPVTLKQDIYTDLFQKGKKVTKKQLCNYLATRGLIESSEQVTGIDIAINNSLSTYGKFKAIFGEDIKLDHIQHMIDDIVFWCTVYGDSKQFLKEQIEDKYKGKLSPEQMKRILGFKFKDWGNLSKEFFELKGADKSTGEAVSIIRALWENNLNLMELINSSEFDFKEQLADYEANSLKTLSDFEPEDLNDYYFSAPVRRMIWQTTLIIKELVHVLGKEPARIFIEMTREKDASRGRTLSRKKKFEDLYKNVKDENTDWAKVIEHADESGTIRSKKMYLYLTQKGRCMYTGNHIELSDLFNDNLYDIDHIYPRHFVKDDNIDNNLVLVTKEKNAHKSDNYPLEAEIFNKQRNMWTQLRKEGFISEEKYNRLMGRNAFTDEQKAGFIARQLVETSQGTKGVAELFHQLLPNSKIVYAKAGNVSDFRRNRELPKSRLVNDFHHAHDAYLNIVVGNVYYVKFTQNPINYIKNSYNKDMNKNNYNLSRMFDWDVKRGDEVAWIAQKQDGAAGTISTVKKMLSKNTPLMTRLSYEGKGALANETLYSAEKAKGEGYIPFKSSDTKIQDVTKYGGFTSVTGAYFFLVEHDEKKKRIRTIESVPLYLADKIDKDSSELERYCDKLGLVNYDVRVRKIKIGSLIKYNGYFCYITGKTGYRLIVRNATNLCLTSNWRKYIKKIEKYKETTIIDNVITAEENIKLYNELLNKFTVGIFGRRPNPIGEKMDSARDKFASLSIENQCLALYQILQLTAILGNESDLQLIGASTHAGKMLISKKIGTDEIYLINQSPTGLFETKIDLQTI

SEQ ID NO: 3150 - protein, 1358 aa, unidentified
  REGION 1..1358: note = Description of Unknown: uncultivated organism sequence
  REGION 1..1358: note = Category: MG91 effectors
  REGION 1..1358: note = Description: MG91-342 effector
MEKEYYLGLDMGTNSVGWAVTDDAYNLIRFKGKDMWGIREFDEANPAVERRTHRTSRRREQRNAVRMGLIRSYFADEIQKVDSNFYQRLDNSFFHVEDKQDNVKDKNGIFNDKNYKDADYYKQYPTIFHLRKELIEDASQKDVRLVYLAVANMFKHRGHFLLSGIGSESSKQTITDLYNQVSGLITEEYGISLKTDIAGTDFEQVLCSREYSRTRKSEKVCEILEIKNSDKLKKAFVKSMCGLSVKITDVIDDTFTEISDEDKKITFSFVDSDYDEKAGVLEEKLGTDVYDIISKLKEIHDKAQVAEIMKNYQYLSFARVADYEKHKKDLKILKRVVKKYFEPTVYDKLFRSGENGTYSAYVNSFNSGEKSRRNYKERKQEDLYNSIKKLIKSIDNVCDTDIEYIKNEIEKENFLPKQLTFKNGVIPNQIHASELKAILKNAEKYLPFLNEKDESGYTVSERILMLFSFQIPYYVGPVSPNSNGWVKRLEPGQVLPWNIDKKIDLKETSEQFIQRMVRNCTYIAGEKVLPKASLLYENFKVLNEINNLSINGERIAVALKQDLYNTLFLKGKRVTRKQIFNYFHSRGLVEEDSQISGIDIAVNNSLSTYGKFLPLFGEHLKEDKYKKMVDDIVFWCTVYGDSRKFLREQIEEKYSDVLDENQIKRITGMKFKDWGNLSKEFLELSGCCKSTGEMIPLIRAMWETNYNLMELLHSEEFTYSEELEEKQGKIEKVLSEYTIDDLNEEYFSAPVKRMVWQTLLIIKEIEKIMKCPPTRIFVEMTRKDDEKGDNGRKSSRKDQLLALYKKIQSEDKEWKKEMSSRIEDYDKNGALRSKKLYLYFIQKGLDMYTGKPIDLDNLMSANSNYDIDHIYPRHFVKDDNINNNLVLASKPANAEKSDIYPIKDSIYQKMKYTWKVLRDEGLITEEKYKRLTGRNPFTDEQKAGFIARQLVETGQGTKGVADLLTALLPDTKLVYSKAGNVSDFRKRYDIPKSRLINDFHHAHDAYLNIVVGNIYFTKFTSNPLNYIRKECSSKDNKYQYNLGNMYKWDVKRDGKTAWIAAKEGETGTIATVKKILSRNTPTLTRLTIEGHGGIADATLYSHKKAKQDAYIPLKSSDARMADVTKYGGYSSVTTAYLFLVEHEIKGKKIRTLETVPLYLKDRLENSKEKLEEYCRESLGYTNPSVRMKKIKLQSLIKLNGYYMQISGKSIKQFEVRNYVQICLNGKWVDYIHKLEKYHDKGVIDNAITDEKNVELYNILCEKHSVGIFTLRPNPVGDKIKKGYDKFVNLTTEEQIKLLIEIIKLTCVGIVKADLRLIGASEKSGTMKINKNITDAKECFLINQSVTGLYENRIDLLRV

SEQ ID NO: 3151 - protein, 1358 aa, unidentified
  REGION 1..1358: note = Description of Unknown: uncultivated organism sequence
  REGION 1..1358: note = Category: MG91 effectors
  REGION 1..1358: note = Description: MG91-343 effector
MEKEYYLGLDMGTNSVGWAVTDDAYNLIRFKGKDMWGIREFDEANPAVERRTHRTSRRREQRNAVRMGLIRSYFADEIQKVDSNFYQRLDNSFFHVEDKQDNVKDKNGIFNDKNYKDANYYKQYPTIFHLRKELIEDVSQKDVRLVYLAVANMFKHRGHFLLSGIGSESSKQTITDLYNQVSGLITEEYGISLKTDIAGTDFEQVLCSREYSRTRKSEKVCEILEIKNSDKLKKAFVKSMCGLSVKITDVIDDTFTEISDEDKKITFSFVDSDYDEKAGVLEEKLGTDVYDIISKLKEIHDKAQVAEIMKNYQYLSFARVADYEKHKKDLKILKRVVKKYFEPTVYDKLFRSGENGTYSAYVNSFNSGEKSRRNYKERKQEDLYNSIKKLLKSIDNVCDTDIEYIKNEIEKENFLPKQLTFKNGVIPNQIHVSELKAILKNAEKYLPFLNEKDESGYTVSERILMLFSFQIPYYVGPVSPNSNGWVKRLEPGQVLPWNIDKKIDLKETSEQFIQRMVRNCTYIAGEKVLPKASLLYENFKVLNEINNLSINGERITVNLKQDLYNTLFLKGKRVTRKQIFNYFHSRGLVEEDSQISGIDIAVNNSLSTYGKFLPLFGEHLKEDKYKKMVDDIVFWCTVYGDSRKFLREQLEEKYSDVLDENQIKRITGMKFKDWGNLSKEFLELSGCCKLTGEVMPLIRAMWETNYNLMELLHSEEFTYSEELEEKQGKIEKVLSEYTIDDLNEEYFSAPVKRMVWQTLLIIKEIEKIMKCPPTRIFVEMTRKDDEKGDNGRKSSRKDQLLALYKKIQSEDKEWKKEMSSRIEDYDKKGALRSKKLYLYFIQKGLDMYTGKPIDLDNLMSANSNYDIDHIYPRHFVKDDNINNNLVLASKPANAEKSDIYPIKDSIYQKMKYTWKVLRDEGLITEEKYKRLTGRNPFTDEQKAGFIARQLVETGQGTKGVADLLTALLPDTKLVYSKAGNVSGFRKRYDIPKSRLINDFHHAHDAYLNIVVGNIYFTKFTSNPLNYIRKECSSKDNKYQYNLGNMYKWDVKRDGKTAWIAAKEGETGTIATVKKILSRNTPTLTRLTIEGHGGIADATLYSHKKAKQDAYIPLKSSDARMADVTKYGGYSSVTTAYLFLVEHEIKGKKIRTLETVPLYLKDRLENSKEKLEEYCRETLGYTNPSVRMKKIKLQSLIKLNGYYMQISGRTGNRFTLRNYVQLCLNGKWVDYIHKLEKYQDKGFIDNVITDEKNVELYNVLCEKHNVGIYTMRPNPVGDRIKNGYDKFVNLTIEEQIKLLIEIIKLTCVGIVSADLTLIGGASISGKMLISKNITDAKECLLINQSVTGLYENRIDLLRV

SEQ ID NO: 3152 - protein, 1347 aa, unidentified
  REGION 1..1347: note = Description of Unknown: uncultivated organism sequence
  REGION 1..1347: note = Category: MG91 effectors
  REGION 1..1347: note = Description: MG91-344 effector
MEEKEYYLGLDMGTNSVGWAVTDPQYRILRAKGKDMWGIREFESAETAEKRRGHRTSRRRRQREVVRMGLVKDYFSDAINNVDGNFYARLENSKYHLEDKDEAVRNKNGIFADEHYTDKEYYAEYPTIYHLIMELINNPAPHDVRLVYLAVANLFKRRGHFLNAGLSEDGGNQSMQTAYDEFNTTCNETIGFSFPGIDATQIEEVLKNRNYSKTVKSEKLAELLGVEKKEKQRIEILRAIAGRKVNAKVIFPNVETEDKVEFSFSDAAFDDNATELMTLLGDECYSLVLCMREMYDIGTLAEIMHGYQYLSESRMADYQKHHEDLVLLKSVIKSECTQKQYDELFRLDGEGSYSAYVNSTLAKNHKQRRSMKGRTRDDFYKKVRGLIGKSSNPDAIKICTEIENETFMPKMLTSANGIIPNQVHYKELKAILSNAEKYLPFLLEKDESGLTTSDRIQRLYKFRIPYYVGPVSNRDGKGNGWAVRKEEGMVLPWNLEEKIDLSKTKEAFIENLIRRCTYISDEKVLPKNSLIYEKFTVLNEINNIRINDERISVELKQDIYNELFKKGKKVTRKTLVKYLINRGVIEAENQISGIDIAINNSLSSYGKFKAVFGESMDTDTTKKMVEDIIKTSTIYGDDKRELKNILRDKYGEILSEDQIKRIAGFRFKDWGRLSRAFLELAGADRSTGEVTSIIQALWESQLNLMELLHSEDYTFGESLNEKLVKNEKSLSEITAEDLDDYYFSAPVKRMAWQTILLIKEISKIKGCEPSKIFIEMTRTDEEKGDKGRKNSRAKELTALYKNIKKEGKAWIELIGKEDASGRLKSKKMYLYIKQMGRDMYTGEQIDLDRLFDDNLYDIDHIYPRHFVKDNNIENNLVLVNKAKNSRKSDNYPLDSDIVRNPKVRELWEMLHTNHLMSDEKYHRLTSRKAFTDEDLAGFIARQLVETGQATKGVADLLKELTSSEIIYSKAGNVSDFRHAYDIPKSRIVNEFHHAHDAYLNIVVGNAYYTKFTSNPLNYIRNEYKKNTKENNYHLNKIFESTISRNGYVAWLAGSDKNPGTIQTVKKMLSRNTPLMTRMTFVVHGSIADETLYGKNTAKEDSYLPLKGSDPRMSVEKYGGFNKASGAYFFLVEHELKGKKVRTIETVPVYLMKKLSDERELQKYCEEKLGLINPSIRLKQIKMQSLIKLDGYFVNVTGRTNQRLTLRNAVNLKLDKEDIYIIHLVEKCIGEERDDRLSEESILSLYQTLTEKQASGIYRNRPNSVYEKLNEGMIRFNNLERKQQIKVLANILNLTMVGKAQADLKDIGGSANSGVMLMAKKINNYNEVKLINQSVTGLYQTEVDLLTV

SEQ ID NO: 3153 - protein, 1352 aa, unidentified
  REGION 1..1352: note = Description of Unknown: uncultivated organism sequence
  REGION 1..1352: note = Category: MG91 effectors
  REGION 1..1352: note = Description: MG91-345 effector
MTAFKYYLGLDMGTNSVGWAATDPEYRLLKAKGKDLWGIREFNEASGAVERRTHRISRRRKQREQVRIGILKDYFHDAICEVDPSFFQRLENSKYHEEDKDVEVRYKNNIFNDSNYTDKDYFNEYPTIYHLRNELISSTEKHDVRLVFLALLNMFKHRGHFLNAGLGENNGESNIDNAYFELTELLSELTEYHLSQDIDCKQIEAILSRRDMSRTHKAEELAGVLHVDLKNKPYKELIRGLCGLKFNACVVFPDVQSEEVTKLDICLSESTFDEKSDEIANIIGEDYFEIIMAMKEMFDIGSLASIMKGHNYLSQARVASYTKHKEDLKLLKEVIKKYCGKKEYDKFFNSDADGSYASYVGSYNSKNKERRVGNKRTSEELYKEIKKLLKDAQKEDENVQKILTSIENETFLPKQLTASNGVIPNQVHAREMKKILSNAENYLPFLTEKDETGLSVSERILKLFTFQIPYYVGPTSENSGKNGGNGWVVRREDGQVLPWNIDEKIDMKATSEAFISRMVRRCTYISGEQVLPKASLEYQSYCVLNEINNIKIDGERISVELKQDIYKAVFQKGKKVTKKQLCKYLHTRGIIETEEQVTGVDVSINNALTTYGKFKPIFGEDISKDSVQKMIEDIVFWCTVYGDSKKFLKDRIEEKYGNKLSEEQIKRILGFKFKDWGNLSKKFLELNGADTSTGESISIIRALWNNNLNLMELINSSLYNYKECLAEYQNTMLKTLSEIEAEDLNEYYFSAPVRRMIWQTILVIKELVKVLGCEPERIFVEMTRRPDEHKTRTSSRRNKFEELYKKVKDETTDWMQVIANAEEDGKIRSKKMYLYLTQKGRCMYTGKHIELDDLFDNNLYDIDHIYPRHFVKDDNIDNNLVLVCKEKNAHKSDHYPIEEEIFLSQKKMWLELRKSGFITEEKYNRLMGRSPFSDEKKAGFIARQLVETSQGTKGVANILRQLLPGSKIVYAKASNVSEFRHTRDDIPKSRLVNDFHHAHDAYLNIVVGNVYYVKFTQNPLNFIKKDYDKYKEDYNLSKMFDWDVKRNGEVAWIAQRKDGEAGTITTVKKMLSRNTPLMTRYSFEGKGGLANETLYSAKKAKGEGYIPFKSSDDKMQDVTKYGGFTKVTGAYFFLVEHTEKKKRIRTIESVPVYLAQKIEQNPDELKKYCEEILGLVDADIRLKKIKIGSLIKRNGYFCYITGKTGDRLSVRNAVNLCLKNEWIKYISKLEKVKEKDTVDEIITKEKNEVLYSELIQKFKHGIFSKRPNPVEDKLEKGSEKFSNLSIKEQCAVLCQILQLAAVLGSECDMTLLGESAHCGKMLISKKIGDEEIYLLNQSVTGLYEKKINLHTV

SEQ ID NO: 3154 - protein, 1359 aa, unidentified
  REGION 1..1359: note = Description of Unknown: uncultivated organism sequence
  REGION 1..1359: note = Category: MG91 effectors
  REGION 1..1359: note = Description: MG91-346 effector
MRETGKDYYLGLDMGTNSVGWAVTDENYVLMRAKGKDLWGIREFDEALTAVDRRTHRVARRRRQRETARIGLLKEYFHDAIAEVDPDFYQRLDNSKYHEEDKDSAVKGKNGIFNDANYNDKDYFKQYPTIFHLRKELIESTEKHDVRLVYLALLNMFKHRGHFLNAGLSTESENTMDTAYHNFVETAAQTIECNFMETVDIEKIKEILGSRDYSRSKKAELVAQILHVDSKNKVQMACIKCICGLKVTAAAIFGDKMAADEEKKTDICFSDFGYDEKVPVILEIVGEENFELVLAMQEIYDIGSLAGIMKDSLYLSMARVKEYEQHGKDLRILKGVVKKYGTKEEYDTLFRTMEEGTYSAYVNSVNTKKKSRRDVKKRTRDEFYGRLKKIISKMPQNDSDVLYIKDKMEKEAFLPKQLTASNGVIPNQIHAREMKKILQNAEIYLPFLKEKDTSGLTVSERILKLFSFQIPYYVGPVSEKSKLNGGNGWVVRKEEGTVLPWNIEEKIDMTATSREFVERMVRRCSYLSDERVLPKGSLLYERFCVLNEINAIKVDGVKIPVEIKQDLYSKYFKKGKKVTKKKIAEFLIARGVIKEDQTELISGIDIAVNSTLSTYAKFYAIFGEKMEQDSYKKMVEQIVEWCTIYGDAKKFLEQKIKECYGNILTQEEIKRITGFKFRDWGRLSKEFLELSGCSKATGEVMPLISMMWETNDNLMELLDDNYYTYREALEEKQNNAFKLLADIEPEDLDEMYFSAPVKRMVWQTLCIIKELEKVLGKAPKRLFVEMTRNEQKDKKRTDSRKQQFLDLYKNIKDESRDWKELITRADENGTLKSKKMYLYLTQRGRCMYTGHPIDLEDLFKDNRYDIDHIYPRHFVKDDNIMNNLVLVEKEKNAHKSDNYPLEEEIYKKQLPMWKDLHQRKLITDEKFKRLTGRNEFTDEQKAGFIARQLVETSQGTKGVTTILERALPDTKIVYAKASNVSEFRQKRDLLKSRVVNDFHHAQDAYLNIVVGNVYFVKFTQNPLHFIKAEYDKNKAQYEYNLSRMFDRDVRRGNETAWIGCKKGEEAGTILTVKKMMAKNTPMLTRLSFEGKGGLADQTLYSAEKAKGNGYIPLKTSDSKMQDVTKYGGFNSVSTAYFFLVEHELKGKKVRTLETVPIIWRDRIEKDETMLLKYCTDVLELKNPSIRVKKIKLQSYIKKDGYYMYITGKTNKQITTKNAVELCVNQRWIDYIKIIEKTVEKKKEECEEIDYDKNVEFYDLLLTKHTQEIFSNRPNPVGAKLKQGRDKFVSLTLLEQCRVLYEILQLSIIGNTRADLQLIGGAAISGVMLLSKNITDSKEFILINQSVTGLFEQKVDLLTV

SEQ ID NO: 3155 - protein, 1359 aa, unidentified
  REGION 1..1359: note = Description of Unknown: uncultivated organism sequence
  REGION 1..1359: note = Category: MG91 effectors
  REGION 1..1359: note = Description: MG91-347 effector
MLNTPYYLGLDMGTNSVGWAVTDKNYNLLRAKGKDLWGIREFSDSATSVDRRSYRIRRRRRQREQARIGLLKYYFNDSIIAKDPSFFQRLENSKYHLEDKDEAVKYKFNIFNDKTYTDIDYYTQYPTIYHLRKELLESSEPHDVRLVYLALLNMFKHRGHFLNAEIGDVAEERKLKDAYIDFCSCVSELTNESFNLDIDYSAVEEILSSRDISRTKKSEALASILNIDVKNKKYKEYVKAICGLKVNAYTLFSEQLSDEVKRIDICVSDASFDTKREDYISILGEDLFQIILYIKEIYDIGSLAGILKGYSYLSFARVATYEKHKSDLRKLKDCIRKYCSKEDYNQFFNSDAAGFYASYIGSFNSGKKQRRVGKNTTSEDLYKEIKKILKNADKNDPEIIDIFSSIDTESFLPKQLTASNGVIPNQVHYKEMAKILSNAESYLPFLREKNESNLSVSERILQIYKFQIPYYIGPVTEKSHRDGGNGWVIRKSNGRVLPWNINEKIDVKATSEAFISRMVRRCTYMNGAQVLPKASLEYESFRVLNEINNLRIDGERIPVDLKQAIYIDIFQKGKKITADILHKYLFNKGYIQSSEQVTGIDININNSLSTYGKFKVIFGEDIKLDSVQHMIEDIVFWCTVYGDSKKFLQEQIEEKYSDKISKEQLKRILGFKFKDWGSLSKEFFELKATDKSTGENISIIRALWENNLNLMELINSSKFNFKERLEEYRITSLKTLSDFEPEDLREYYFSAPVRKMIWQTMLVIKELVHVLGHEPERIFIEIPRDKDPSIGRTISRKKKFEELYKNVKDESVDWMNVIEHADDSGSLRSKKMYLYLTQKGRCMYTGEHIELSDLFNKSLYDIDHIYPRHFVKDDNIDNNLVLVKREKNAHKSDNYPLEAEIFNNQKKMWAQLRKEDFINEEKYKRLMGRNPFTDEQKAGFIARQLVETQQGTKGVAELLQQLLPNSKIVYTKAGNVSDFRHSREIPKSRLINDFHHAHDAYLSIVVGNVYYVKFTQNPINFIKNAYNKDSSKNNYNLTRMFDWDVKRRDEVAWIAQNKNGTVGTIAIVKKMLKRNTPLMTRLSYEGKGGLTKETLYSAEKAKGEGYIPFKSSDKKMQDVTKYGGFTSVKGAYFFLVEHDEKKKQIRTIESVPLYLADKIEKDPAELERYCQKLGLVNYNIRVRKIKIGTLIKRNGYFAYLTGKTGKQLILRNATNLCLDSKWGTYIKKIEKYKDTGVLDNTLDTDTNIKLYNELLDKFTTGIYGKRPNPIGDKMLSAKNTFTSFTLDNQCNLIYQILQLSKILGFETDLSLLHTNKKSDKPTREGGMQISKKVSNTTSMYLINQSPTGLFEKQIDLLTV

SEQ ID NO: 3156 - protein, 1359 aa, unidentified
  REGION 1..1359: note = Description of Unknown: uncultivated organism sequence
  REGION 1..1359: note = Category: MG91 effectors
  REGION 1..1359: note = Description: MG91-348 effector
MRETGKDYYLGLDMGTNSVGWAVTDENYVLMRAKGKDLWGIREFDEALTAVDRRTHRVARRRRQREIARIGLLKEYFHDAIAEVDPDFYQRLDNSKYHEEDKDSAVKGKNGIFNDANYNDKDYFKQYPTIFHLRKELIESTEKHDVRLVYLALLNMFKHRGHFLNAGLSTESENTMDTAYHNFVETAAQTIECNFMETVDIEKIKEILGSRDYSRSKKAELVAQILHVDSKNKVQMACIKCICGLKVTAAAIFGDKMAADEEKKTDICFSDFGYDEKVPVILEIVGEENFELVLAMQEIYDIGSLAGIMKDSLYLSMARVKEYEQHGKDLRILKGVVKKYGTKEEYDTLFRTMEEGTYSAYVNSVNTKKKSRRDVKKRTRDEFYGRLKKIISKMPQNDSDVLYIKDKMEKEAFLPKQLTASNGVIPNQIHAREMKKILQNAEIYLPFLKEKDTSGLTVSERILKLFSFQIPYYVGPVSEKSKLNGGNGWVVRKEEGTVLPWNIEEKIDMTATSREFVERMVRRCSYLSDERVLPKGSLLYERFCVLNEINAIKVDGVKIPVEIKQDLYSKYFKKGKKVTKKKIAEFLIARGVIKEDQTELISGIDIAVNSTLSTYAKFYAIFGEKMEQDSYKKMVEQIVEWCTIYGDAKKFLEQKIKECYGNVLTQEEIKRITGFKFRDWGRLSKEFLELSGCSKATGEVMPLISMMWETNDNLMELLDDNYYTYREALEEKQNNAFKLLADIEPEDLDEMYFSAPVKRMVWQTLCIIKELEKVLGKAPKRLFVEMTRNEQKDKKRTDSRKQQFLDLYKNIKDESRDWKELITRADENGTLKSKKMYLYLTQMGRCMYTGHPIDLEDLFKDNRYDIDHIYPRHFVKDDNIMNNLVLVEKEKNAHKSDNYPLEEEIYKKQLPMWKDLHQRKLITDEKFKRLTGRNEFTDEQKAGFIARQLVETSQGTKGVTTILERALPDTKIVYAKASNVSEFRQKRDLLKSRVVNDFHHAQDAYLNIVVGNVYFVKFTQNPLHFIKAEYDKNKAQYEYNLSRMFDRDVRRGNETAWIGCKKGEEAGTILTVKKMMAKNTPMLTRLSFEGKGGLADQTLYSAEKAKGNGYIPLKTSDSKMQDVTKYGGFNSVSTAYFFLVEHELKGKKVRTLETVPIIWRDRIEKDETMLLKYCTDVLELKNPSIRVKKIKLQSYIKKDGYYMYITGKTNKQITTKNAVELCVNQRWIDYIKIIEKTVEKKKEECEEIDYDKNVEFYDLLLTKHTQEIFSNRPNPVGAKLKQGRDKFVSLTLLEQCRVLYEILQLSIIGNTRADLQLIGGAAISGVMLLSKNITDSKEFILINQSVTGLFEQKVDLLTV

SEQ ID NO: 3157 - protein, 1359 aa, unidentified
  REGION 1..1359: note = Description of Unknown: uncultivated organism sequence
  REGION 1..1359: note = Category: MG91 effectors
  REGION 1..1359: note = Description: MG91-349 effector
MQEKPYYLGLDMGTNSVGWAVTDQHYNLLKAKGKDLWGIREFIEADTSVERRTHRISRRRRQREQARIGLLNDYFHDAIIAIDPSFFQRLENSKYHLEDKDQNVRYKYNIFNDPDYTDADYYTQYPTIYHLRKELLENPKPHDVRLVYLALLNMFKHRGHFLNSGISDGNNERSLKDAYINFAISVSELTEDYFNQDVDYSTIEEILSSRDLNRTKKAEELSTVLGIDFKNKKYKEYLRAICGLKINAYTLFSDQLPDDTTKIDLCVSDASFDEKSEELVSLIGEDLFQIILNIKEIYDIGSLAGILKGYTYLSQARVAAYDKHKHDLKLLKSSIKKYCTKEEYNNFFNSDADGSYASYIGSFNSGNKERRVGSKRTSEDLYKEIKKLLKGANKSDPAINEIFTSIETESFLPKQLTASNGIIPNQVHSKEMARILTNAENYLPFLKETDENNLSISNRILQLYKFQIPYYIGPVTEKSQRDGGSGWVIRKDNGRVFPWNIEEKIDVKATSEAFISRMVRRCTYMNGKQVLPKASLEYESFRVLNEINNLRIDGERIPVTLKQDIYTDLFQKGKKVTKKQLCNYLATRGLIESSEQVTGIDIAINNSLSTYGKFKAIFGEDIELDHIQHMIEDIVFWCTVYGDSKQFLKEQIEDKYKGKLSPEQMKRILGFKFKDWGNLSKEFFELKGADKSTGEAVSIIRALWENNLNLMELINSPEFDFKEQLADYEANSLKTLSDFEPEDLNEYYFSAPVRRMIWQTTLIIKELVHVLGKEPARIFIEMTREKDASRGRTLSRKKKFEDLYKNVKDENTDWAKVIEHADESGTIRSKKMYLYLTQKGRCMYTGNHIELSDLFNDNLYDIDHIYPRHFVKDDNIDNNLVLVTKEKNAHKSDNYPLEAEIFNKQRNMWTQLRKEGFISEEKYNRLMGRNAFTDEQKAGFIARQLVETSQGTKGVAELFHQLLPNSKIVYAKAGNVSDFRRNRELPKSRLVNDFHHAHDAYLNIVVGNVYYVKFTQNPINYIKNSYNKDMNKNNYNLSRMFDWDVKRGDEVAWIAQKQDGAAGTISTVKKMLSKNTPLMTRLSYEGKGALANETLYSAEKAKGEGYIPFKSSDAKIQDVTKYGGFTSVTGAYFFLVEHDEKKKRIRTIESVPLYLADKIDKNSSELERYCDKLGLVNYDIRVRKIKIGSLLNRNGYFAYLTGKTGKQLILRNATNLCLDKKWTIYIKKIEKYKETNLLDSIITSETMVNLYNELLNKFTVGIYGRRPNPIGEKMDSAKNTFTSYTLDNQCNLIYQILQLSKILGFETDLSLLRTNKQSSKPTREGGMQISKKIDNTTSMYLINQSPTGLFETKIDLQTI

SEQ ID NO: 3158 - protein, 1352 aa, unidentified
  REGION 1..1352: note = Description of Unknown: uncultivated organism sequence
  REGION 1..1352: note = Category: MG91 effectors
  REGION 1..1352: note = Description: MG91-350 effector
MLEKPYYLGLDMGTNSVGWAVTDQQYNLLKAKGKDLWGIREFAEADTSVERRTHRISRRRRQREQARIGLLNDYFHDAIIAIDPSFFQRLENSKYHLEDKDQNVRYKYNIFNDPDYTDADYYTQYPTIYHLRKELLENPKPHDVRLVYLALLNMFKHRGHFLNSGISDGNNERSLKDAYINFAISVSELTEDYFNQEVNYSTIEGILSSRDLNRTKKAEELSTVLGIDFKNKKYKEYLRAICGLKINAYTLFSDQLPDDTTKIDLCVSDASFDEKSEELVSLIGEDLFQIILNIKEIYDIGSLAGILKGYTYLSQARVAAYDKHKHDLKLLKSSIKKYCTKEEYNNFFNSDADGSYASYIGSFNSGNKERRVGSKRTSEDLYKEIKKLLKGANKSDPAINEIFTSIETESFLPKQLTASNGIIPNQVHSKEMARILTNAENYLPFLKETDENNLSISNRILQLYKFQIPYYIGPVTEKSQRDGGNGWVIRKDNGRVFPWNIEEKIDVKATSEAFISRMVRRCTYMNGKQVLPKASLEYESFRVLNEINNLRIDGERIPVTLKQDIYTDLFQKGKKVTKKQLCNYLATRGLIESSEQVTGIDIAINNSLSTYGKFKAILGEDIKLDHIQHMIEDIVFWCTVYGDSKQFLKEQIEDKYKGKLSPEQMKRILGFKFKDWGNLSKEFFELKGADKSTGEAVSIIRALWENNLNLMELINSPEFDFKEQLADYEANSLKTLSDFEPEDLNEYYFSAPVRRMIWQTTLIIKELVHVLGEEPARIFIEMTREKDASRGRTLSRKKKFEDLYKNVKDENTDWAKVIEHADESGTIRSKKMYLYLTQKGRCMYTGNHIELSDLFNDNLYDIDHIYPRHFVKDDNIDNNLVLVTKEKNAHKSDNYPLEAEIFNKQRNMWTQLRKEGFISEEKYNRLMGRNAFTDEQKAGFIARQLVETSQGTKGVAELFHQLLPNSKIVYAKAGNVSDFRRNRELPKSRLVNDFHHAHDAYLNIVVGNVYYVKFTQNPINYIKNSYNKDMNKNNYNLSRMFDWDVKRGDEVAWVAQKQDAAAGTISTVKKMLSKNTPLMTRLSYEGKGALANETLYSAEKAKGEGYIPFKSSDAKIQDVTKYGGFTSVTGAYFFLVEHDEKKKRIRTIESVPLYLADKIDKDSSELERYCDKLGLVNYDVRVRKIKIGSLIKYNGYFCYITGKTGYRLIVRNATNLCLASNWRKYIKKIEKYKETTIIDNVITAEENIKLYNELLNKFTVGIFGRRPNPIGEKMDSARDKFASLSIENQCLALYQILQLTAILGNESDLQLIGASTHAGKMLISKKIGTDEIYLINQSPTGLFETKIDLQTI

SEQ ID NO: 3159 - protein, 1349 aa, unidentified
  REGION 1..1349: note = Description of Unknown: uncultivated organism sequence
  REGION 1..1349: note = Category: MG91 effectors
  REGION 1..1349: note = Description: MG91-351 effector
MKNYFLGLDMGTNSVGWAVTDDNYNILRAKGKDLWGIREFESANTAEERRMHRTARRNRQREVVRRGYLQSYFADAINDVDPNFFARMQNSKYYLEDKAPEARVKDVLFNDKDYHDKDYYEEYPTIYHLRMDLINNPNPHDVRLVYLAIANIFKHRGHFLNQGLGESNGESNMQIAYDRLISMLSSNYNIELPELDADQITDILKDRRYSKTVKSEKLKELIPYHDVENKKFYSEIINAISGRKVKGKNLFPELEGEDNIDFSFAESSFDDNLSEFVSKIGEERYALIEILREIYSIGSLAEIMHGCRYLSESRVKDYDKHHSDLKKLKNVIKKYCDKTVYDEIFRSDDNGTYSAYVNSVNSSTSGKIRRNMKDRKRDDFYSKIKKIVGGMPKEDSDVQDILSDIDRETFMPKMLTSDNGIIPNGVHARELSAILHNAEQYLDFLRAEDENGLSVSDKILQLFKFRIPYYIGPVANYNGKGNGWAVRKANGPVLPWNISEKIDIKATKEKFIERLIRDCTYISGEKVLPKGSMLYERFMVLNEINNIRINDERIPVELKQSIYTDLFERGKRVTKNQLFKYLNNKGLVQDKEQITGLNDQIAGTLTSYGRFYQIFGEKLKEDSIKAQVEEIIKLCTIYGDDKKELANVLRDTYGNLLSDDEIRRICGYKYKDWGRLSRAFLELEGCNKQTGEITTLIQELWNTSYNLMELLHSPDYTFSETLDKQTRSSEKLLSEITPEDLNEFYFSAPVRRMVWQTILLIREITHIMGNEPGKIFIEMTRTDEEKGENGRKQSRKNELTELYKSVKDDLQNWKELIAQEDESGRLRSKKMYLYILQMGRDMYTGEPIDLDNLFNDNIYDIDHIYPRQFVKDNNLQNNMVLVNKQANSRKTNNYPLDASIASNSKVQDLWKTLHEHHLMNDEKYHRLTRRTPFSDEDKAGFIARQMVETGQATKGVADLLKELMPESRIVYSKAGNVSDFRRDYGIVKSRIVNDFHHAHDAYLNIVVGNVYLTKFTDNPLNFVKKEYSRDPEKNHYHLDKMFIWDVKRGNYTAWVKGKEGTISTVKKTLSKNSPILTRMTFEAHGQISEQTLIGKKTAKAGVYLPLKGNDARMTVEKYGGFSSAKGAYYCLVEHGTKAKRIRSIETVPIYKAAEIGDSKDELTKYLGNELGLVNPDVRIAKILMQSLFKRNGYFVYLTGRSGNQLILQNAVNLVLAYDEISYIHKLEKYSLSSIADDLTSEKNVGLYDVLSNKFNGSIFKDRPNPVGKLLISGRDKFLDLNLEEQCYVLIQILNLSKIGVAKADLKLIGGSSQSGMMKMSKTLKPDDRMELIYQSVSGIFEKRVDLLKV

SEQ ID NO: 3160 - protein, 1358 aa, unidentified
  REGION 1..1358: note = Description of Unknown: uncultivated organism sequence
  REGION 1..1358: note = Category: MG91 effectors
  REGION 1..1358: note = Description: MG91-352 effector
MEKEYYLGLDMGTNSVGWAVTDDAYNLIRFKGKDMWGIREFDEANPAVERRTHRTSRRREQRNAVRMGLIRSYFADEIQKVDSNFYQRLDNSFFHVEDKQDNVKDKNGIFNDKNYKDADYYKQYPTIFHLRKELIEDASQKDVRLVYLAVANMFKHRGHFLLSGIGSESSKQTITDLYNQVSGLITEEYGISLKTDIAGTDFEQVLCSREYSRTRKSEKVCEILEIKNSDKLKKAFVKSMCGLSVKITDVIDDTFTEISDEDKKITFSFVDSDYDEKAGVLEEKLGTDVYDIISKLKEIHDKAQVAEIMKNYQYLSFARVADYEKHKKDLKILKRVVKKYFEPTVYDKLFRSGENGTYSAYVNSFNSGEKSRRNYKERKQEDLYNSIKKLLKSIDNVCDTDIEYIKNEIEKENFLPKQLTFKNGVIPNQIHASELKAILKNAEKYLPFLNEKDESGYTVSERILMLFSFQIPYYVGPVSSNSNGWVKRLEPGQVLPWNIDKKIDLKETSEQFIQRMVRNCTYIAGEKVLPKASLLYENFKVLNEINNLSINGERIAVALKQDLYNTLFLKGKRVTRKQIFNYFHSRGLVEEDSQISGIDIAVNNSLSTYGKFLPLFGEHLKEDKYKKMVDDIVFWCTVYGDSRKFLREQLEEKYSDVLDENQIKRITGMKFKDWGNLSKEFLELLGCCKSTGEMIPLIRAMWETNYNLMELLHSEEFTYSEELEEKQGKIEKVLSEYTIDDLNEEYFSAPVKRMVWQTLLIIKEIEKIMKCPPTRIFVEMTRKDDEKGDNGRKSSRKDQLLALYKKIQSEDKEWKKEMSSRIEDYDKNGALRSKKLYLYFIQKGLDMYTGKPIDLDNLMSANSNYDIDHIYPRHFVKDDNINNNLVLASKPANAEKSDIYPIKDSIYQKMKYTWKVLRDEGLITEEKYKRLTGRNPFTDEQKAGFIARQLVETGQGTKGVADLLTALLPDTKLVYSKAGNVSDFRKRYDIHKSRLINDFHHAHDAYLNIVVGNIYFTKFTSNPLNYIRKECSSKDNKYQYNLGNMYKWDVKRDGKTAWIAAKEGETGTIATVKKILSRNTPTLTRLTIEGHGGIADATLYSHKKAKQDAYIPLKSSDARMADVTKYGGYSSVTTAYLFLVEHEIKGKKIRTLETVPLYLKDRLENSKEKLEEYCRETLGYTNPSVRMKKIKLQSLIKLNGYYMQISGRTGNRFTLRNYVQLCLNGKWVDYIHKLEKYQDKGFIDNVITDEKNVELYNVLCEKHNVGIYTMRPNPVGDRIKNGYDKFVNLTTEEQIKLLIEIIKLTCVGIVSADLTLIGGAAISGKMLMSKNITDANECILINQSVTGLYENRIDLLRV

SEQ ID NO: 3161 - protein, 1358 aa, unidentified
  REGION 1..1358: note = Description of Unknown: uncultivated organism sequence
  REGION 1..1358: note = Category: MG91 effectors
  REGION 1..1358: note = Description: MG91-353 effector
MEKEYYLGLDMGTNSVGWAVTDDAYNLIRFKGKDMWGIREFDEANPAVERRTHRTSRRREQRNAVRMGLIRSYFADEIQKVDSNFYQRLDNSFFHVEDKQDNVKDKNGIFNDKNYKDANYYKQYPTIFHLRKELIEDVSQKDVRLVYLAVANMFKHRGHFLLSGIGSESSKQTITDLYNQVSGLITEEYGISLKTDIAGTDFEQVLCSREYSRTRKSEKVCEILEIKNSDKLKKAFVKSMCGLSVKITDVIDDTFTEISDEDKKITFSFVDSDYDEKAGVLEEKLGTDVYDIISKLKEIHDKAQVAEIMKNYQYLSFARVADYEKHKKDLKILKRVVKKYFEPTVYDKLFRSGENGTYSAYVNSFNSGEKSRRNYKERKQEDLYNSIKKLLKSIDNVCDTDIEYIKNEIEKENFLPKQLTFKNGVIPNQIHVSELKAILKNAEKYLPFLNEKDESGYTVSERILMLFSFQIPYYVGPVSPNSNGWVKRLEPGQVLPWNIDKKIDLKETSEQFIQRMVRNCTYIAGEKVLPKASLLYENFKVLNEINNLSINGERITVNLKQDLYNTLFLKGKRVTRKQIFNYFHSRGLVEEDSQISGIDIAVNNSLSTYGKFLPLFGEHLKEDKYKKMVDDIVFWCTVYGDSRKFLREQLEEKYSDVLDENQIKRITGMKFKDWGNLSKEFLELSGCCKSTGEVMPLIRAMWETNYNLMELLHSEEFTYSEELEEKQGKIEKVLSEYTIDDLNEEYFSAPVKRMVWQTLLIIKEIEKIMKCPPTRIFVEMTRKDDEKGDNGRKSSRKDQLLALYKKIQSEDKEWKKEMSSRIEDYDKKGALRSKKLYLYFIQKGLDMYTGKPIDLDNLMSANSNYDIDHIYPRHFVKDDNINNNLVLASKPANAEKSDIYPIKDSIYQKMKYTWKVLRDEGLITEEKYKRLTGRNPFTDEQKAGFIARQLVETGQGTKGVADLLTALLPDTKLVYSKAGNVSGFRKRYDIPKSRLINDFHHAHDAYLNIVVGNIYFTKFTSNPLNYIRKECSSKDNKYQYNLGNMYKWDVKRDGKTAWIAAKEGETGTIATVKKILSRNTPTLTRLTIEGHGGIADATLYSHKKAKQDAYIPLKSSDARMADVTKYGGYSSVTTAYLFLVEHEIKGKKIRTLETVPLYLKDRLENSKEKLEEYCRETLGYTNPSVRMKKIKLQSLIKLNGYYMQISGRTGNRFTLRNYVQLCLNGKWVDYIHKLEKYQDKGFIDNVITDEKNVELYNVLCEKHNVGIYTMRPNPVGDRIKNGYDKFVNLTIEEQIKLLIEIIKLTCVGIVSADLTLIGGASISGKMLISKNITDAKECLLINQSVTGLYENRIDLLRV

SEQ ID NO: 3162 - protein, 1358 aa, unidentified
  REGION 1..1358: note = Description of Unknown: uncultivated organism sequence
  REGION 1..1358: note = Category: MG91 effectors
  REGION 1..1358: note = Description: MG91-354 effector
MEKEYYLGLDMGTNSVGWAVTDDAYNLIRFKGKDMWGIREFDEANPAVERRTHRTSRRREQRNAVRMGLIRSYFADEIQKVDSNFYQRLDNSFFHVEDKQDNVKDKNGIFNDKNYKDADYYKQYPTIFHLRKELIEDASQKDVRLVYLAVANMFKHRGHFLLSGIGSESSKQTITDLYNQVSGLITEEYGISLKTDIAGTDFEQVLCSREYSRTRKSEKVCEILEIKNSDKLKKAFVKSMCGLSVKITDIIDDTFTEISDEDKKITFSFVDSDYDEKAGVLEEKLGTDVYDIISKLKEIHDKAQVAEIMKNYQYLSFARVADYEKHKKDLKILKRVVKKHFEPTVYDKLFRSEENGTYSAYVNSFNSEEKSRRNYKERKQEDLYNSIKKLLKSVDNVDDTDIEYIKNEMDKENFLPKQLTFKNGVIPNQIHASELKAILKNAEKYLPFLNEKDESGYTVSERILKLFSFQIPYYVGPVSSNSNGWVKRLESGQVLPWNIDKKIDLKETSEQFIQRMVRNCTYIAGEKVLPKASLLYENFKVLNEINNLSINDERITVNLKQDLYNTLFLKGKRVTRKQIFNYFHSRGLVEEDSQISGIDIAVNNSLSTYGKFLPLFGEHLKEDKYKKMVDDIVFWCTVYGDSRKFLREQLEEKYSDVLDENQIKRITGMKFKDWGNLSKEFLELSGCCKSTGEMIPLIRAMWETNYNLMELLHSEEFTYSEELEEKQGKIEKVLSEYTIDDLNEEYFSAPVKRMVWQTLLIIKEIEKIMKCPPTRIFVEMTRKDDEKGDNGRKSSRKDQLLALYKKIQSEDKEWKKEMSSRIEDYDKNGALRSKKLYLYFIQKGLDMYTGKPIDLDNLMSANSNYDIDHIYPRHFVKDDNINNNLVLASKPANAEKSDIYPIKDSIYQKMKYTWKVLRDEGLITEEKYKRLTGRNPFTDEQKAGFIARQLVETGQGTKGVADLLTALLPDTKLVYSKAGNVSDFRKRYDIPKSRLINDFHHAHDAYLNIVVGNIYFTKFTSNPLNYIRKECSSKDNKYQYNLGNMYKWDVKRDGKTAWIAAKEGETGTIATVKKILSRNTPTLTRLTIEGHGGIADATLYSHKKAKQDAYIPLKSSDARMADVTKYGGYSSVTTAYLFLVEHEIKGKKIRTLETVPLYLKDRLENSKEKLEEYCRETLGYTNPSVRMKKIKLQSLIKLNGYYMQISGRTGNRFTLRNYVQLCLNGKWVDYIHKLEKYQDKGFIDNVITDEKNVELYNVLCEKHSVGIFTLRPNPVGDKIKKGYDKFVNLTTEEQIKLLIEIIKLTCVGIVSANLTLIGGASISGKMLISKNITDAKECLLINQSVTGLYENRIDLLRV

SEQ ID NO: 3163 - protein, 1358 aa, unidentified
  REGION 1..1358: note = Description of Unknown: uncultivated organism sequence
  REGION 1..1358: note = Category: MG91 effectors
  REGION 1..1358: note = Description: MG91-355 effector
MEKEYYLGLDMGTNSVGWAVTDDAYNLIRFKGKDMWGIREFDEANPAVERRTHRTSRRREQRNAVRMGLIRSYFADEIQKVDSNFYQRLDNSFFYVEDKQDNVKDKNGIFNDKNYKDANYYKQYPTIFHLRKELIEDASQKDVRLVYLAVANMFKHRGHFLLSGIGSESSKQTITDLYNQVSGLITEEYGISLKTDIAGTDFEQVLCSREYSRTRKSEKVCEILEIKNSDKLKKAFVKSMCGLSVKITDIIDDTFTEISDEDKKITFSFVDSDYDEKAGVLEEKLGTDVYDIISKLKEIHDKAQVAEIMKNYQYLSFARVADYEKHKKDLKILKRVVKKYFEPTVYDKLFRSEENGTYSAYVNSFNSEEKSRRNYKERKQEDLYNSIKKLLKSVDNVDDTDIEYIKNEMDKENFLPKQLTFKNGVIPNQIHASELKAILKNAEKYLPFLNEKDESGYTVSERILMLFSFQIPYYVGPVSSNSNGWVKRLEPGQVLPWNIDKKIDLKETSEQFIQRMVRNCTYIAGEKVLPKASLLYENFKVLNEINNLSINGERITVNLKQDLYNTLFLKGKRVTRKQIFNYFHSRGLVEEDSQISGIDIAVNNSLSTYGKFLPLFGEHLKEDKYKKMVDDIVFWCTVYGDSRKFLREQLEEKYSDVLDENQIKRITGMKFKDWGNLSKEFLELSGCCKSTGEVMPLIRAMWETNYNLMELLHSEEFTYSEELEEKQGKIEKVLSEYTIDDLNEEYFSAPVKRMVWQTLLIIKEIEKIMKCPPTRIFVEMTRKDDEKGDNGRKSSRKDQLLALYKKIQSEDKEWKKEMSSRIEDYDKNGALRSKKLYLYFIQKGLDMYTGKPIDLDNLMSANSNYDIDHIYPRHFVKDDNINNNLVLASKPANAEKSDIYPIKDSIYQKMKYTWKVLRDEGLITEEKYKRLTGRNPFTDEQKAGFIARQLVETGQGTKGVADLLTALLPDTKLVYSKAGNVSDFRKRYDIPKSRLINDFHHAHDAYLNIVVGNIYFTKFTSNPLNYIRKECSSKDNKYQYNLGNMYKWDVKRDGKTAWVAPEEGETGTLATVKKMLSRNTPILTRLTIEGHGGIADATLYSHKKAKQDTYIPLKSSDARMADVTKYGGYSSVTTAYLFLVEHEIKGKKIRTLETVPLYLKDRLENSKEKLEEYCRETLGYTNPSVRMKKIKLQSLIKLNGYYMQISGKTNKQFTVRNYVQFCLNSKWVDYIHKLEKYQDKGVIDDAITDEKNVELYNVLCEKHSVGIFTLRPNPVGDKIKKGYDKFVNLTTEEQIKLLIEIIKLTCVGIVSANLTLIGGASISGKMLISKNITDAKECLLINQSVTGLYENRIDLLRV

SEQ ID NO: 3164 - protein, 1352 aa, unidentified
  REGION 1..1352: note = Description of Unknown: uncultivated organism sequence
  REGION 1..1352: note = Category: MG91 effectors
  REGION 1..1352: note = Description: MG91-356 effector
MTAFKYYLGLDMGTNSVGWAATDPEYRLLKAKGKDLWGIREFNEASGAVERRTHRISRRRRQREQVRIGILKDYFHDAICEVDPSFFRRLENSKYHEEDKDVEVRYKNNIFNDGNYTDKDYFNEYPTIYHLRNELISSTEKHDVRLVFLALLNMFKHRGHFLNAGLGENNGESNIDNAYFELTELLSELTEYHLSQDIDCKQIEAILSRRDMSRTHKAEELAGVLHVDLKNKPYKELIRGLCGLKFNACVVFPDVQSEEVTKLDICLSESSFDEKSDEIANIIGEDYFEIIMAMKEMFDIGSLASIMKGHNYLSQARVASYTKHKEDLKLLKEVIKKYCGKKEYDKFFNSDADGSYASYVGSYNSKNKERRVGNKRTSEELYKEIKKLLKDAPKEDENVQKILTSIENETFLPKQLTASNGVIPNQVHAREMKKILSNAENYLPFLTEKDETGLSVSERILKLFTFQIPYYVGPTSENSGKNGGNGWVVRREDGQVLPWNIDEKIDMKATSEAFISRMVRRCTYISGEQVLPKASLEYQSYCVLNEINNIKIDGERISVELKQDIYKAVFQKGKKVTKKQLCKYLHTRGIIETEEQVTGVDVSINNALTTYGKFKPIFGEDISKDSVQKMIEDIVFWCTVYGDSKKFLKDRIEEKYGNKLSEEQIKRILGFKFKDWGNLSKKFLELNGADTSTGESISIIRALWNNNLNLMELINSSLYNYKECLAEYQNTMLKTLSEIEAEDLNEYYFSAPVRRIIWQTILVIKELVKVLGCEPERIFVEMTRRPDEHKTRTSSRRNKFEELYKKVKDEATDWMQVIAKAEEDGKIRSKKMYLYLTQKGRCMYTGKHIELDDLFDKNLYDIDHIYPRHFVKDDNIDNNLVLVCKEKNAHKSDHYPIEEEIFLSQKKMWLELRKSGFITEEKYNRLMGRSPFSDEQKAGFIARQLVETSQGTKGVANILRQLLPGSKIVYAKASNVSEFRHTRDDIPKSRLVNDFHHAHDAYLNIVVGNVYYVKFTQNPLNFIKKDYDKYKEDYNLSKMFDWDVKRNGEVAWIAQRKDGEAGTITTVKRMLSRNTPLMTRYSFEGKGGLANETLCSAKKAKGEGYIPFKSSDDKMQDVTKYGGFTKVTGAYFFLVEHTEKKKRIRTIESVPVYLAQKIEQNPDELKKYCKEILGLVDADIRLKKIKIGSLIKRNGYFCYITGKTGNRLSVRNAVNLCLKNEWIKYISKLEKVKEKDAVDEIITKEKNEVLYSELIQKFKHGIFSKRPNPVEDKLEKGSEKFSNLSIKEQCAVLCQILQLAAVLGSECDMTLLGESAHCGKMLISKKIGDEEIYLLNQSVTGLYEKKINLHTV

SEQ ID NO: 3165 - protein, 1358 aa, unidentified
  REGION 1..1358: note = Description of Unknown: uncultivated organism sequence
  REGION 1..1358: note = Category: MG91 effectors
  REGION 1..1358: note = Description: MG91-357 effector
MEKEYYLGLDMGTNSVGWAVTDDAYNLIRFKGKDMWGIREFDEANPAVERRTHRTSRRREQRNAVRMGLIRSYFADEIQKVDSNFYQRLDNSFFHVEDKQDNVKDKNGIFNDKNYKDADYYKQYPTIFHLRKELIEDASQKDVRLVYLAVANMFKHRGHFLLSGIRSESSKQTITDLYNQVSGLITEEYGISLKTDIAGTDFEQVLCSREYSRTRKSEKVCEILEIKNSDKLKKAFVKSMCGLSVKITDVIDDTFTEISDEDKKITFSFVDSDYDEKAGVLEEKLGTDVYDIISKLKEIHDKAQVAEIMKNYQYLSFARVADYEKHKKDLKILKRVVKKYFEPTVYDKLFRSGENGTYSAYVNSFNSGEKSRRNYKERKQEDLYNSIKKLLKSIDNVCDTDIEYIKNEIEKENFLPKQLTFKNGVIPNQIHASELKAILKNAEKYLPFLNEKDESGYTVSERILMLFSFQIPYYVGPVSPNSNGWVKRLEPGQVLPWNIDKKIDLKETSEQFIQRMVRNCTYIAGEKVLPKASLLYENFKVLNEINNLSINGERIAVALKQDLYNTLFLKGKRVTRKQIFNYFHSRGLVEEDSQISGIDIAVNNSLSTYGKFLPLFGEHLKEDKYKKMVDDIVFWCTVYGDSRKFLREQLEEKYSDVLDENQIKRITGMKFKDWGNLSKEFLELLGCCKSTGEMIPLIRAMWETNYNLMELLHSEEFTYSEELEEKQGKIEKVLSEYTIDDLNEEYFSAPVKRMVWQTLLIIKEIEKIMKCPPTRIFVEMTRKDDEKGDNGRKSSRKDQLLALYKKIQSEDKEWKKEMSSRIEDYDKNGALRSKKLYLYFIQKGLDMYTGKPIDLDNLMSANSNYDIDHIYPRHFVKDDNINNNLVLASKPANAEKSDIYPIKDSIYQKMKYTWKVLRDEGLITEEKYKRLTGRNPFTDEQKAGFIARQLVETGQGTKGVADLLTALLPDTKLVYSKAGNVSDFRKRYDIPKSRLINDFHHAHDAYLNIVVGNIYFTKFTSNPLNYIRKECSSKDNKYQYNLGNMYKWDVKRDGKTAWIAAKEGETGTIATVKKILSRNTPTLTRLTIEGHGGIADATLYSHKKAKQDAYIPLKSSDARMADVTKYGGYSSVTTAYLFLVEHEIKGKKIRTLETVPLYLKDRLENSKEKLEEYCRETLGYTNPSVRMKKIKLQSLIKLNGYYMQISGKTNKQFTVRNYVQFCLNSKWVDYIHKLEKYQDKGVIDDAITDEKNVELYNVLCEKHSVGIFTLRPNPVGDKIKKGYDKFVNLTTEEQIKLLIEIIKLTCVGIVSANLTLIGGAAISGKMLISKNITDAKECLLINQSVTGLYENRIDLLRV

SEQ ID NO: 3166 - protein, 1358 aa, unidentified
  REGION 1..1358: note = Description of Unknown: uncultivated organism sequence
  REGION 1..1358: note = Category: MG91 effectors
  REGION 1..1358: note = Description: MG91-358 effector
MEKEYYLGLDMGTNSVGWAVTDDAYNLIRFKGKDMWGIREFDEANPAVERRTHRTSRRREQRNAVRMGLIRSYFADEIQKVDSNFYQRLDNSFFHVEDKQDNVKDKNGIFNDKNYKDADYYKQYPTIFHLRKELIEDASQKDVRLVYLAVANMFKHRGHFLLSGIGSESSKQTITDLYNQVSGLITEEYGISLKTDIAGTDFEQVLCSREYSRTRKSEKVCEILEIKNSDKLKKAFVKSMCGLSVKITDVIDDTFTEISDEDKKITFSFVDSDYDEKAGVLEEKLGTDVYDIISKLKEIHDKAQVAEIMKNYQYLSFARVADYEKHKKDLKILKRVVKKYFEPTVYDKLFRSGENGTYSAYVNSFNSGEKSRRNYKERKQEDLYNSIKKLIKSIDNVCDTDIEYIKNEIEKENFLPKQLTFKNGVIPNQIHASELKAILKNAEKYLPFLNEKDESGYTVSERILMLFSFQIPYYVGPVSPNSNGWVKRLEPGQVLPWNIDKKIDLKETSEQFIQRMVRNCTYIAGEKVLPKASLLYENFKVLNEINNLSINGERIAVALKQDLYNTLFLKGKRVTRKQIFNYFHSRGLVEEDSQISGIDIAVNNSLSTYGKFLPLFGEHLKEDKYKKMVDDIVFWCTVYGDSRKFLREQLEEKYSDVLDENQIKRITGMKFKDWGNLSKEFLELLGCCKSTGEMIPLIRAMWETNYNLMELLHSEEFTYSEELEEKQGKIEKVLSEYTIDDLNEEYFSAPVKRMVWQTLLIIKEIEKIMKCPPTRIFVEMTRKDDEKGDNGRKSSRKDQLLALYKKIQSEDKEWKKEMSSRIEDYDKNGALRSKKLYLYFIQKGLDMYTGKPIDLDNLMSANSNYDIDHIYPRHFVKDDNINNNLVLASKTANAEKSDIYPIKDSIYQKMKYTWKVLRDEGLITEEKYKRLTGRNPFTDEQKAGFIARQLVETGQGTKGVADLLTALLPDTKLVYSKAGNVSDFRKRYDIPKSRLINDFHHAHDAYLNIVVGNIYFTKFTSNPLNYIRKECSSKDNKYQYNLGNMYKWDVKRDGKTAWIAAKEGETGTIATVKKMLSRNTPTLTRLTIEGHGGIADATLYSHKKAKQDAYIPLKSSDARMADVTKYGGYSSVTTAYLFLVEHEIKGKKIRTLETVPLYLKDRLENSKEKLEEYCRETLGYTNPSVRMKKIKLQSLIKLNGYYMQISGKTNKQFTVRNYVQFCLNSKWVDYIHKLEKYQDKGVIDDAITDEKNVELYNVLCEKHSVGIFTLRPNPVGDKIKKGYDKFVNLTTEEQIKLLIEIIKLTCVGIVSANLTLIGGASISGKMLISKNITDAKECLLINQSVTGLYENRIDLLRV

SEQ ID NO: 3167 - protein, 1358 aa, unidentified
  REGION 1..1358: note = Description of Unknown: uncultivated organism sequence
  REGION 1..1358: note = Category: MG91 effectors
  REGION 1..1358: note = Description: MG91-359 effector
MEKEYYLGLDMGTNSVGWAVTDDAYNLIRFKGKDMWGIREFDEANPAVERRTHRTSRRREQRNAVRMGLIRSYFADEIQKVDSNFYQRLDNSFFHVEDKQDNVKDKNGIFNDKNYKDADYYKQYPTIFHLRKELIEDASQKDVRLVYLAVANMFKHRGHFLLSGIGSESSKQTITDLYNQVSGLITEEYGISLKTDIAGTDFEQVLCSREYSRTRKSEKVCEILEIKNSDKLKKAFVKSMCGLSVKITDIIDDTFTEISDEDKKITFSFVDSDYDEKAGVLEEKLGTDVYDIISKLKEIHDKAQVAEIMKNYQYLSFARVADYEKHKKDLKILKRVVKKYFEPTVYDKLFRSEENGTYSAYVNSFNSEEKSRRNYKERKQEDLYNSIKKLLKSVDNVDDTDIEYIKNEMDKENFLPKQLTFKNGVIPNQIHASELKAILKNAEKYLPFLNEKDESGYTVSERILMLFSFQIPYYVGPVSSNSNGWVKRLEPGQVLPWNIDKKIDLKETSEQFIQRMVRNCTYIAGEKVLPKASLLYENFKVLNEINNLSINGERITVNLKQDLYNTLFLKGKRVTRKQIFNYFHSRGLVEEDSQISGIDIAVNNSLSTYGKFLPLFGEHLKEDKYKKMVDDIVFWCTVYGDSRKFLREQLEEKYSDVLDENQIKRITGMKFKDWGNLSKEFLELSGCCKSTGEVMPLIRAMWETNYNLMELLHSEEFTYSEELEEKQGKIEKVLSEYTIDDLNEEYFSAPVKRMIWQTLLIIKEIEKIMKCPPTRIFVEMTRKDDEKGDNGRKSSRKDQLLALYKKIQSEDKEWKKEMSSRIEDYDKNGALRSKKLYLYFIQKGLDMYTGKPIDLDNLMSANSNYDIDHIYPRHFVKDDNINNNLVLASKPANAEKSDIYPIKDSIYQKMKYTWKVLRDEGLITEEKYKRLTGRNPFTDEQKAGFIARQLVETGQGTKGVADLLTALLPDTKLVYSKAGNVSDFRKRYDIPKSRLINDFHHAHDAYLNIVVGNIYFTKFTSNPLNYIRKECSSKDNKYQYNLGNMYKWDVKRDGKTAWVAPEEGETGTLATVKKMLSRNTPILTRLTIEGHGGIADATLYSHKKAKQDTYIPLKSSDARMADVTKYGGYSSVTTAYLFLVEHEIKGKKIRTLETVPLYLKDRLENSKEKLEEYCRETLGYTNPSVRMKKIKLQSLIKLNGYYMQISGKTNKQFTVRNYVQFCLNSKWVDYIHKLEKYQDKGVIDDAITDEKNVELYNVLCEKHSVGIFTLRPNPVGDKIKKGYDKFVNLTTEEQIKLLIEIIKLTCVGIVSANLTLIGGASISGKMLISKNITDAKECLLINQSVTGLYENRIDLLRV

SEQ ID NO: 3168 - protein, 1358 aa, unidentified
  REGION 1..1358: note = Description of Unknown: uncultivated organism sequence
  REGION 1..1358: note = Category: MG91 effectors
  REGION 1..1358: note = Description: MG91-360 effector
MEKEYYLGLDMGTNSVGWAVTDDAYNLIRFKGKDMWGIREFDEANPAVERRTHRTSRRREQRNAVRMGLIRSYFADEIQKVDSNFYQRLDNSFFHVEDKQDNVKDKNGIFNDKNYKDADYYKQYPTIFHLRKELIEDASQKDVRLVYLAVANMFKHRGHFLLSGIGSESSKQTITDLYNQVSGLITEEYGISLKTDIAGTDFEQVLCSREYSRTRKSEKVCEILEIKNSDKLKKAFVKSMCGLSVKITDIIDDTFTEISDEDKKITFSFVDSDYDEKAGVLEEKLGTDVYDIISKLKEIHDKAQVAEIMKNYQYLSFARVADYEKHKKDLKILKRVVKKHFEPTVYDKLFRSEENGTYSAYVNSFNSEEKSRRNYKERKQEDLYNSIKKLLKSVDNVDDTDIEYIKNEMDKENFLPKQLTFKNGVIPNQIHASELKAILKNAEKYLPFLNEKDESGYTVSERILMLFSFQIPYYVGPVSSNSNGWVKRLESGQVLPWNIDKKIDLKETSEQFIQRMVRNCTYIAGEKVLPKASLLYENFKVLNEINNLSINGERIAVALKQDLYNTLFLKGKRVTRKQIFNYFHSRGLVEEDSQISGIDIAVNNSLSTYGKFLPLFGEHLKEDKYKKMVDDIVFWCTVYGDSRKFLREQLEEKYSDVLDENQIKRITGMKFKDWGNLSKEFLELSGCCKSTGEMIPLIRAMWETNYNLMELLHSEEFTYSEELEEKQGKIEKVLSEYTIDDLNEEYFSAPVKRMVWQTLLIIKEIEKIMKCPPTRIFVEMTRKDDEKGDNGRKSSRKDQLLALYKKIQSEDKEWKKEMSSRIEDYDKNGALRSKKLYLYFIQKGLDMYTGKPIDLDNLMSANSNYDIDHIYPRHFVKDDNINNNLVLASKPANAEKSDIYPIKDSIYQKMKYTWKVLRDEGLITEEKYKRLTGRNPFTDEQKAGFIARQLVETGQGTKGVADLLTALLPDTKLVYSKAGNVSDFRKKYDIPKSRLINDFHHAHDAYLNIVVGNIYFTKFTSNPLNYIRKECSSKDNKYQYNLGNMYKWDVKRDGKTAWIAAKEGETGTLATVKKMLSRNTPILTRLAIEGHGGIADATLYSHKKAKQDAYIPLKSSDARMADVTKYGGYSSVTTAYLFLVEHEIKGKKIRTLETVPLYLKDRLENSKEKLEEYCRETLGYTNPSVRMKKIKLQSLIKLNGYYMQISGKTNKQFTVRNYVQFCLNSKWVDYIHKLEKYQDKGVIDDAITDEKNVELYNVLCEKHSVGIFTLRPNPVGDKIKKGYDKFVNLTTEEQIKLLIEIIKLTCVGIVSANLTLIGGASISGKMLISKNITDAKECLLINQSVTGLYENRIDLLRV

SEQ ID NO: 3169 - protein, 1358 aa, unidentified
  REGION 1..1358: note = Description of Unknown: uncultivated organism sequence
  REGION 1..1358: note = Category: MG91 effectors
  REGION 1..1358: note = Description: MG91-361 effector
MEKEYYLGLDMGTNSVGWAVTDDAYNLIRFKGKDMWGIREFDEANPAVERRTHRTSRRREQRNAVRMGLIRSYFADEIQKVDSNFYQRLDNSFFHVEDKQDNVKDKNGIFNDKNYKDADYYKQYPTIFHLRKELIEDAFQKDVRLVYLAVANMFKHRGHFLLSGIGSESSKQTITDLYNQVSGLITEEYGISLKTDIAGTDFEQVLCSREYSRTRKLEKVCEILEIKNSDKLKKAFVKSMCGLSVKITDVIDDTFTEISDEDKKITFSFVDSDYDEKAGVLEEKLGTDVYDIISKLKEIHDKAQVAEIMKNYQYLSFARVADYEKHKKDLKILKRVVKKYFEPTVYDKLFRSGENGTYSAYVNSFNSGEKSRRNYKERKQEDLYNSIKKLLKSIDNVCDTDIEYIKNEIEKENFLPKQLTFKNGVIPNQIHASELKAILKNAEKYLPFLNEKDESGYTVSERILMLFSFQIPYYVGPVSPNSNGWVKRLEPGQVLPWNIDKKIDLKETSEQFIQRMVRNCTYIAGEKVLPKASLLYENFKVLNEINNLSINGERIAVALKQDLYNTLFLKGKRVTRKQIFNYFHSRGLVEEDSQISGIDIAVNNSLSTYGKFLPLFGEHLKEDKYKKMVDDIVFWCTVYGDSRKFLREQLEEKYSDVLDENQIKRITGMKFKDWGNLSKEFLELLGCCKSTGEMIPLIRAMWETNYNLMELLHSEEFTYSEELEEKQGKIEKVLSEYTIDDLNEEYFSAPVKRMVWQTLLIIKEIEKIMKCPPTRIFVEMTRKDDEKGDNGRKSSRKDQLLALYKKIQSEDKEWKKEMSSRIEDYDKNGALRSKKLYLYFIQKGLDMYTGKPIDLDNLMSANSNYDIDHIYPRHFVKDDNINNNLVLASKPANAEKSDIYPIKDSIYQKMKYTWKVLRDEGLITEEKYKRLTGRNPFTDEQKAGFIARQLVETGQGTKGVADLLTALLPDTKLVYSKAGNVSDFRKRYDIPKSRLINDFHHAHDAYLNIVVGNIYFTKFTSNPLNYIRKECSSKDNKYQYNLGNMYKWDVKRDGKTAWIAAKEGETGTIATVKKILSRNTPTLTRLTIEGHGGIADATLYSHKKAKQDAYIPLKSSDARMADVTKYGGYSSVTTAYLFLVEHEIKGKKIRTLETVPLYLKDRLENSKEKLEEYCRESLGYTNPSVRMKKIKLQSLIKLNGYYMQISGKSIKQFEVRNYVQICLNGKWVDYIHKLEKYQDKGVIDNAITDEKNVELYNVLCEKHNVGIYTMRPNPVGDRIKNGYDKFVNLTTEEQIKLLIEIIKLTCVGIVSADLTLIGGAAISGKMLMSKNITDANECILINQSVTGLYENRIDLLRV

SEQ ID NO: 3170 - protein, 1358 aa, unidentified
  REGION 1..1358: note = Description of Unknown: uncultivated organism sequence
  REGION 1..1358: note = Category: MG91 effectors
  REGION 1..1358: note = Description: MG91-362 effector
MEKEYYLGLDMGTNSVGWAVTDDAYNLIRFKGKDMWGIREFDEANPAVERRTHRTSRRREQRNAVRMGLIRSYFADEIQKVDSNFYQRLDNSFFYVEDKQDNVKDKNGIFNDKNYKDANYYKQYPTIFHLRKELIEDASQKDVRLVYLAVANMFKHRGHFLLSGIGSESSKQTITDLYNQVSGLITEEYGISLKTDIAGTDFEQVLCSREYSRTRKSEKVCEILEIKNSDKLKKAFVKSMCGLSVKITDIIDDTFTEISDEDKKITFSFVDSDYDEKAGVLEEKLGTDVYDIISKLKEIHDKAQVAEIMKNYQYLSFARVADYEKHKKDLKILKRVVKKYFEPTVYDKLFRSEENGTYSAYVNSFNSEEKSRRNYKERKQEDLYNSIKKLLKSVDNVDDTDIEYIKNEMDKENFLPKQLTFKNGVIPNQIHASELKAILKNAEKYLPFLNEKDESGYTVSERILMLFSFQIPYYVGPVSSNSNGWGKRLEPGQVLPWNIDKKIDLKETSEQFIQRMVRNCTYIAGEKVLPKASLLYENFKVLNEINNLSINGERITVNLKQDLYNTLFLKGKRVTRKQIFNYFHSRGLVEEDSQISGIDIAVNNSLSTYGKFLPLFGEHLKEDKYKKMVDDIVFWCTVYGDSRKFLREQLEEKYSDVLDENQIKRITGMKFKDWGNLSKEFLELSGCCKSTGEVMPLIRAMWETNYNLMELLHSEEFTYSEELEEKQGKIEKVLSEYTIDDLNEEYFSAPVKRMVWQTLLIIKEIEKIMKCPPTRIFVEMTRKDDEKGDNGRKSSRKDQLLALYKKIQSEDKEWKKEMSSRIEDYDKNGALRSKKLYLYFIQKGLDMYTGKPIDLDNLMSANSNYDIDHIYPRHFVKDDNINNNLVLASKPANAEKSDIYPIKDSIYQKMKYTWKVLRDEGLITEEKYKRLTGRNPFTDEQKAGFIARQLVETGQGTKGVADLLTALLPDTKLVYSKAGNVSDFRKRYDIPKSRLINDFHHAHDAYLNIVVGNIYFTKFTSNPLNYIRKECSSKDNKYQYNLGNMYKWDVKRDGKTAWVAPEEGETGTLATVKKMLSRNTPILTRLTIEGHGGIADATLYSHKKAKQDTYIPLKSSDARMADVTKYGGYSSVTTAYLFLVEHEIKGKKIRTLETVPLYLKDRLENSKEKLEEYCRETLGYTNPSVRMKKIKLQSLIKLNGYYMQISGKTNKQFTVRNYVQFCLNSKWVDYIHKLEKYQDKGVIDDAITDEKNVELYNVLCEKHSVGIFTLRPNPVGDKIKKGYDKFVNLTTEEQIKLLIEIIKLTCVGIVSANLTLIGGASISGKMLISKNITDAKECLLINQSVTGLYENRIDLLRV

SEQ ID NO: 3171 - protein, 1358 aa, unidentified
  REGION 1..1358: note = Description of Unknown: uncultivated organism sequence
  REGION 1..1358: note = Category: MG91 effectors
  REGION 1..1358: note = Description: MG91-363 effector
MEKEYYLGLDMGTNSVGWAVTDDAYNLIRFKGKDMWGIREFDEANPAVERRTHRTSRRREQRNAVRMGLIRSYFADEIQKVDSNFYQRLDNSFFHVEDKQDNVKDKNGIFNDKNYKDADYYKQYPTIFHLRKELIEDASQKDVRLVYLAVANMFKHRGHFLLSGIGSESSKQTITDLYNQVSGLITEEYGISLKTDIAGTDFEQVLCSREYSRTRKSEKVCEILEIKNSDKLKKAFVKSMCGLSVKITDIIDDTFTEISDEDKKITFSFVDSDYDEKAGVLEEKLGTDVYDIISKLKEIHDKAQVAEIMKNYQYLSFARVADYEKHKKDLKILKRVVKKYFEPTVYDKLFRSEENGTYSAYVNSFNSEEKSRRNYKERKQEDLYNSIKKLLKSVDNVDDTDIEYIKNEMDKENFLPKQLTFKNGVIPNQIHASELKAILKNAEKYLPFLNEKDESGYTVSERILMLFSFQIPYYVGPVSPNSNGWVKRLEPGQVLPWNIDKKIDLKETSEQFIQRMVRNCTYIAGEKVLPKASLLYENFKVLNEINNLSISGERIAVALKQDLYNTLFLKGKRVTRKQIFNYFHSRGLVEEDSQISGIDIAVNNSLSTYGKFLPLFGDHLKEDKYKKMVDDIVFWCTVYDDSRKFLREQLEEKYSDVLDENQIKRITGMKFKDWGNLSKEFLELSGCCKSTGEVMPLIRAMWETNYNLMELLHSEEFTYSEELEEKQGKIEKVLSEYTIDDLNEEYFSAPVKRMVWQTLLIIKEIEKIMKCPPTRIFVEMTRKDDEKGDNGRKSSRKDQLLALYKKIQSEDKEWKKEMSSRIEDYDKNGALRSKKLYLYFIQKGLDMYTGKPIDLDNLMSANSNYDIDHIYPRHFVKDDNINNNLVLASKPANAEKSDIYPIKDSIYQKMKYTWKVLRDEGLITEEKYKRLTGRNPFTDEQKAGFIARQLVETGQGTKGVADLLTALLPDTKLVYSKAGNVSDFRKRYDIPKSRLINDFHHAHDAYLNIVVGNIYFTKFTSNPLNYIRKECSSKDNKYQYNLGNMYKWDVKRDGKTAWVAPKEGETGTLATVKKMLSRNTPILTRLAIEGHGGIVDATRYSHKKVKQDTYIPLKSSDARMADVTKYGGYSDVKIAYLFLVEHETKGKKIRTLETVPIYLKDRLENSKEKLEEYCRETLGYTNPSVRMKKIKLQSLIKLNGYYMQISGKTNKQFTVRNYVQFCLNSKWVDYIHKLEKYQDKGVIDDAITDEKNVELYNVLCEKHSVGIFTLRPNPVGDKIKKGYDKFVNLTTEEQIKLLIEIIKLTCVGIVSANLTLIGGASISGKMLISKNITDAKECLLINQSVTGLYENRIDLLRV

SEQ ID NO: 3172 - protein, 1358 aa, unidentified
  REGION 1..1358: note = Description of Unknown: uncultivated organism sequence
  REGION 1..1358: note = Category: MG91 effectors
  REGION 1..1358: note = Description: MG91-364 effector
MEKEYYLGLDMGTNSVGWAVTDDAYNLIRFKGKDMWGIREFDEANPAVERRTHRTSRRREQRNAVRMGLIRSYFADEIQKVDSNFYQRLDNSFFHVEDKQDNVKDKNGIFNDKNYKDADYYKQYPTIFHLRKELIEDASQKDVRLVYLAVANMFKHRGHFLLSGIGSESSKQTITDLYNQVSGLITEEYGISLKTDIAGTDFEQVLCSREYSRTRKSEKVCEILEIKNSDKLKKAFVKSMCGLSVKITDVIDDTFTEISDEDKKITFSFVDSDYDEKAGVLEEKLGTDVYDIISKLKEIHDKAQVAEIMKNYQYLSFARVADYEKHKKDLKILKRVVKKYFEPTVYDKLFRSGENGTYSAYVNSFNSGEKSRRNYKERKQEDLYNSIKKLLKSIDNVCDTDIEYIKNEIEKENFLPKQLTFKNGVIPNQIHASELKAILKNAEKYLPFLNEKDESGYTVSERILMLFSFQIPYYVGPVSSNSNGWVKRLEPGQVLPWNIDKKIDLKETSEQFIQRMVRNCTYIAGEKVLPKASLLYENFKVLNEINNLSINGERIAVALKQDLYNTLFLKGKRVTRKQIFNYFHSRGLVEEDSQISGIDIAVNNSLSTYGKFLPLFGEHLKEDKYKKMVDDIVFWCTVYGDSRKFLREQLEEKYSDVLDENQIKRITGMKFKDWGNLSKEFLELLGCCKSTGEMIPLIRAMWETNYNLMELLHSEEFTYSEELEEKQGKIEKVLSEYTIDDLNEEYFSAHVKRMVWQTLLIIKEIEKIMKCPPTRIFVEMTRKDDEKGDNGRKSSRKDQLLALYKKIQSEDKEWKKEMSSRIEDYDKNGALRSKKLYLYFIQKGLDMYTGKPIDLDNLMSANSNYDIDHIYPRHFVKDDNINNNLVLASKPANAEKSDIYPIKDSIYQKMKYTWKVLRDEGLITEEKYKRLTGRNPFTDEQKAGFIARQLVETGQGTKGVADLLTALLPDTKLVYSKAGNVSDFRKRYDIHKSRLINDFHHAHDAYLNIVVGNIYFTKFTSNPLNYIRKECSSKDNKYQYNLGNMYKWDVKRDGKTAWIAAKEGETGTIATVKKILSRNTPTLTRLTIEGHGGIADATLYSHKKAKQDAYIPLKSSDARMADVTKYGGYSSVTTAYLFLVEHEIKGKKIRTLETVPLYLKDRLENSKEKLEEYCRETLGYTNPSVRMKKIKLQSLIKLNGYYMQISGRTGNRFTLRNYVQLCLNGKWVDYIHKLEKYQDKGFIDNVITDEKNVELYNVLCEKHNVGIYTMRPNPVGDRIKNGYDKFVNLTTEEQIKLLIEIIKLTCVGIVSADLTLIGGAAISGKMLMSKNITDANECILINQSVTGLYENRIDLLRV

SEQ ID NO: 3173 - protein, 1358 aa, unidentified
  REGION 1..1358: note = Description of Unknown: uncultivated organism sequence
  REGION 1..1358: note = Category: MG91 effectors
  REGION 1..1358: note = Description: MG91-365 effector
MEKEYYLGLDMGTNSVGWAVTDDAYNLIRFKGKDMWGIREFDEANPAVERRTHRTSRRREQRNAVRMGLIRSYFADEIQKVDSNFYQRLDNSFFHVEDKQDNVKDKNGIFNDKNYKDADYYKQYPTIFHLRKELIEDASQKDVRLVYLAVANMFKHRGHFLLSGIGSESSKQTITDLYNQVSGLITEEYGISLKTDIAGTDFEQVLCSREYSRTRKSEKVCEILEIKNSDKLKKAFVKSMCGLSVKITDVIDDTFTEISDEDKKITFSFVDSDYDEKAGVLEEKLGTDVYDIISKLKEIHDKAQVAEIMKNYQYLSFARVADYEKHKKDLKILKRVVKKYFEPTVYDKLFRSGENGTYSAYVNSFNSGEKSRRNYKERKQEDLYNSIKKLLKSIDNVCDTDIEYIKNEIEKENFLPKQLTFKNGVIPNQIHASELKAILKNAEKYLPFLNEKDESGYTVSERILMLFSFQIPYYVGPVSSNSNGWVKRLEPGQVLPWNIDKKIDLKETSEQFIQRMVRNCTYIAGEKVLPKASLLYENFKVLNEINNLSINGERIAVALKQDLYNTLFLKGKRVTRKQIFNYFHSRGLVEEDSQISGIDIAVNNSLSTYGKFLPLFGEHLKEDKYKKMVDDIVFWCTVYGDSRKFLREQLEEKYSDVLDENQIKRITGMKFKDWGNLSKEFLELLGCCKSTGEMIPLIRAMWETNYNLMELLHSEEFTYSEELEEKQGKIEKVLSEYTIDDLNEEYFSAHVKRMVWQTLLIIKEIEKIMKCPPTRIFVEMTRKDDEKGDNGRKSSRKDQLLALYKKIQSEDKEWKKEMSSRIEDYDKNGALRSKKLYLYFIQKGLDMYTGKPIDLDNLMSANSNYDIDHIYPRHFVKDDNINNNLVLASKTANAEKSDIYPIKDSIYQKMKYTWKVLRDEGLITEEKYKRLTGRNPFTDEQKAGFIARQLVETGQGTKGVADLLTALLPDTKLVYSKAGNVSDFRKRYDIPKSRLINDFHHAHDAYLNIVVGNIYFTKFTSNPLNYIRKECSSKDNKYQYNLGNMYKWDVKRDGKTAWIAAKEGETGTLATVKKMLSRNTPILTRLAIEGHGGIADATLYSHKKAKQDAYIPLKSSDARMADVTKYGGYSSVTTAYLFLVEHEIKGKKIRTLETVPLYLKDRLENSKEKLEEYCRETLGYTNPSVRMKKIKLQSLIKLNGYYMQISGKTNKQFTVRNYVQFCLNSKWVDYIHKLEKYQDKGFIDNVITDEKNVELYNVLCEKHNVGIYTMRPNPVGDKIKKGYDKFVNLTTEEQIKLLIEIIKLTCVGIVSANLTLIGGAAISGKMLISKNITDAKECLLINQSVTGLYENRIDLLRV

SEQ ID NO: 3174 - protein, 1352 aa, unidentified
  REGION 1..1352: note = Description of Unknown: uncultivated organism sequence
  REGION 1..1352: note = Category: MG91 effectors
  REGION 1..1352: note = Description: MG91-366 effector
MTAFKYYLGLDMGTNSVGWAATDPEYRLLKAKGKDLWGIREFNEASGAVERRTHRISRRRRQREQVRIGILKDYFHDAICEVDPSFFQRLENSKYHEEDKDVEVRYKNNIFNDSNYTDKDYFNEYPTIYHLRNELISSTEKHDVRLVFLALLNMFKHRGHFLNAGLGENNGESNIDNAYFELTELLSELTEYHLSQDIDCKQIEAILSRRDMSRTHKAEELAGVLHVDLKNKPYKELIRGLCGLKFNACVVFPDVQSEEVTKLDICLSESTFDEKSDEIANIIGEDYFEIIMAMKEMFDIGSLASIMKGHNYLSQARVASYTKHKEDLKLLKEVIKKYCGKKEYDKFFNSDADGSYASYVGSYNSKNKERRVGNKRTSEELYKEIKKLLKDAQKEDENVQKILTSIENETFLPKQLTASNGVIPNQVHAREMKKILSNAENYLPFLTEKDETGLSVSERILKLFTFQIPYYVGPTSENSGKNGGNGWVVRREDGQVLPWNIDEKIDMKATSEAFISRMVRRCTYISGEQVLPKASLEYQSYCVLNEINNIKIDGERISVELKQDIYKAVFQKGKKVTKKQLCKYLHTRGIIETEEQVTGVDVSINNALTTYGKFKPIFGEDISKDSVQKMIEDIVFWCTVYGDSKKFLKDRIEEKYGNKLSEEQIKRILGFKFKDWGNLSKKFLELNGADTSTGESISIIRALWNNNLNLMELINSSLYNYKECLAEYQNTMLKTLSEIEAEDLNEYYFSAPVRRMIWQTILVIKELVKVLGCEPERIFVEMTRKPDEHKTRTSSRRNKFEELYKKVKDETTDWMQVIANAEEDGKIRSKKMYLYLTQKGRCMYTGKHIELDDLFDNNLYDIDHIYPRHFVKDDNIDNNLVLVCKEKNAHKSDHYPIEEEIFLSQKKMWLELRKSGFITEEKYNRLMDRNPFSDEQKAGFIARQLVETSQGTKGVANILRQLLPSSKIVYAKASNVSEFRCTRDDIQKSRLVNDFHHAHDAYLNIVVGNVYYVKFTQNPLNFIKKDYDKYKEDYNLSKMFDWDVKRNGEVAWIAQRKDGAAGTITTVKRMLSRNTPLMTRYSFDGKGGLTNETLYSAKKAKGEGYIPFKSSDDKMQDVTKYGGFTSVTGAYFFLVEHTEKKKRIRTIESVPVYLAQKIEQNPDELKKYCEEILGLIDADIRLKKIKIGSLIKRNGYFCYITGKTVNRLIVRNAVNLCLKNEWIKYISKLEKVKEKDAVDKIITKEKNEVLYSELIQKFKHGIFSKRPNPVGDKLEKDSEKFNNLSIKDQCAVLCQVLRMAAILGSECDMTLLGDSPNCGKMLISKKIGDEEIYLINQSVTGLYEKKINLHTV

SEQ ID NO: 3175 - protein, 1353 aa, unidentified
  REGION 1..1353: note = Description of Unknown: uncultivated organism sequence
  REGION 1..1353: note = Category: MG91 effectors
  REGION 1..1353: note = Description: MG91-367 effector
MEKDYYLGLDMGTDSVGWAVTDENYNLIRAKGKDLWGVREFESAKPAADRRSYRISRRRRQREQVRLGMLKSIFADAIKEKDPLFFIRLENSKYWKDDKNSKINTKNVLFDDPGYTDADYFKEFPTIFHLRLKLMNDDSGRYLSDPRFVYLACLQLFKHRGHFLSDISDETDPSDLSSTYERFKSLYCELTGYEFTEKDVAADDIMNVLSDRNLSRTAKKEKLIDVFSFSKSDSSKTECLKSICGLESDACKIFPDLKTEDIKKLSFNFSKSDYEEKSAELNESVGDEYFELISILKDIYDKGTLADILKGKKYLSEARVEDYNKHKKDLVLLKSVYRKYKTQDEYNEMFRDPTKGYGAYIGSNFTKDKKTSRRGSKSRDVFYDYLKKSLKGLEEDPDVKTIFDDIAKENFLVKQLTSSNGVIPNQVHLKELKKILSNAENYLPFLKETDESGLSASQRIISIFSFTIPYYVGPVSELSEKNGGNGWVVRKEDGKVYPWNFEDKINISETKRRFIDRLINECTYISGEKVLPKQSLIYQKFAMLNELNSVRINGERLDVEFKQKAFKELFSKGKQVTLNEFKNYLNNNGINIDEKSEISGVGKSSEMTRFNNKLSSYQVFHSVFGDKLEDKKYYDAAENIIYLGTIYADDKKTFKKAIEEKYGDFLTPDEIKRVSGLKFKDWGTLSAALFNLQGAEKSTGEVMTLIDALWNTQLNFMELINSDAFSYKEELEKYKKKGEGTIQNFKFEELNDYYFSAPVKRMIWQTVLIVREIEHVLGKPPVKMFVEVTRHDEEKEKIPPSRKDTFLSLYKNIKDESHDWKAIIEKADESGVIRSQKMYLYLSQMGRDLYTGKEIELDELFTTKYDIDHIIPQSLKKDDSILNNKVLTSKDFNNNIKQDNPLCEAIDDAHYAERKKLWDRLHNYNLINDEKYKRLTNRKGFSEEDLEGFIARQIVETSQAVLGVINIFKEIMPDTKIVFSKAKPVSDFRKNEIGWLKSRTLNDYHHAHDAYLNIVVGNVYNTKFTDNPRNFIKKERQKDLNPNYHMNKVFWYNVERGGKVAWIAGEDGTKKTVLKTLAKNSELMTRQSFEQTGGLCNQQITNKDDAGSGIGYLPVKMGEDISKYGGYAKISQSYFFLVEHTFKKKRIRTIETVPAYLKSQIESDPDALKRYCAEKLGLVDPDIRLRRINYQSLAKYNGFYVTICSKTGVRFNIANAVRLTLPKEWNNYIKKLEKTEGDEEITEEKNIELYDILTDKHLNSIFLKRPNPVGENLKNGREKFVSLSKKEQVSTLNNILLFTGFASAGKADISSIGGSKNAGFMKISKNVTNADEFVLIENSVTGIYSVRKDLKTI

SEQ ID NO: 3176 - protein, 1352 aa, unidentified
  REGION 1..1352: note = Description of Unknown: uncultivated organism sequence
  REGION 1..1352: note = Category: MG91 effectors
  REGION 1..1352: note = Description: MG91-368 effector
MQEKPYYLGLDMGTNSVGWAVTDQHYNLLKAKGKDLWGIREFIEADTSVERRTHRISRRRRQREQARIGLLNDYFHDAIIAIDPSFFQRLENSKYHLEDKDQNVRYKYNIFNDPDYTDADYYTQYPTIYHLRKELLENPKPHDVRLVYLALLNMFKHRGHFLNSGISDGNNERSLKDAYINFAISVSELTEDYFNQDVDYSTIEGILSSRDLNRTKKAEELSTVLGIDFKNKKYKEYLRAICGLKINAYTLFSDQLPDDTTKIDLCVSDASFDEKSEELVSLIGEDLFQIILNIKEIYDIGSLAGILKGYTYLSQARVAAYDKHKHDLKLLKSSIKKYCTKEEYNNFFNSDADGSYASYIGSFNSGNKERRVGSKRTSEDLYKEIKKLLKGANKSDPAINEIFTSIETESFLPKQLTASNGIIPNQVHSKEMARILTNAENYLPFLKETDENNLSISNRILQLYKFQIPYYIGPVTEKSQRDGGNGWVIRKDNGRVFPWNIEEKIDVKATSEAFISRMVRRCTYMNGKQVLPKASLEYESFRVLNEINNLRIDGERIPVTLKQDIYTDLFQKGKKVTKKQLCNYLATRGLIESSEQVTGIDIAINNSLSTYGKFKAIFGEDIKLDHIQHMIEDIVFWCTVYGDSKQFLKEQIEDKYKGKLSPEQMKRILGFKFKDWGNLSKEFFELKGADKSTGEAVSIIRALWENNLNLMELINSSEFDFKEQLADYEANSLKTLSDFEPEDLNDYYFSAPVRRMIWQTTLIIKELVHVLGKEPARIFIEMTREKDASRGRTLSRKKKFEDLYKNVKDENTDWAKVIEHADESGTIRSKKMYLYLTQKGRCMYTGNHIELSDLFNDNLYDIDHIYPRHFVKDDNIDNNLVLVTKEKNAHKSDTYPLEAEIFNKQRNMWTQLRKEGFISEEKYNRLMGRNAFTDEQKAGFIARQLVETSQGTKGVAELFHQLLPNSKIVYAKAGNVSDFRRNRELPKSRLVNDFHHAHDAYLNIVVGNVYYVKFTQNPINYIKNSYNKDMNKNNYNLSRMFDWDVKRGDEVAWIAQKQDGAAGTISTVKKMLSKNTPLMTRLSYEGKGALANETLYSAEKAKGEGYIPFKSSDTKIQDVTKYGGFTSVTGAYFFLVEHDEKKKRIRTIESVPLYLADKIDKDSSELERYCDKLGLVNYDVRVRKIKIGSLIKYNGYFCYITGKTGYRLIVRNATNLCLTSNWRKYIKKIEKYKETTIIDNVITAEENIKLYNELLNKFTVGIFGRRPNPIGEKMDSARDKFASLSIENQCLALYQILQLTAILGNESDLQLIGASTHAGKMLISKKIGTDEIYLINQSPTGLFETKIDLQTI

SEQ ID NO: 3177 - protein, 1353 aa, unidentified
  REGION 1..1353: note = Description of Unknown: uncultivated organism sequence
  REGION 1..1353: note = Category: MG91 effectors
  REGION 1..1353: note = Description: MG91-369 effector
MEQKTYYLGLDMGTNSVGWAVTDENYNLLRAKGKDLWGIREFESASGAIERRAHRVSRRNRQRQQVRVGKLNCYFEDAINEVDPNFYARLRNSKYHLEDKEEAVRTPNGIFNDPAYKDKDYYAQYPTIYHLRKELLTNDEPHDVRLVYLALLNMFKHRGHFLNAALTSEGTRHMQDAYNSFQENVYEMCDLSFPDVDGKEIEAVLSNRDLNRSRKSEALMELFHFTKKENKTELEFVKGMCGLTTEASKLFGDLGLEEKVEICFSKASYEDRIPDIMDAVGEENFRVLENLKEIADIGTLAGVLKGYTYLSEARVAEYEKHKSDLKLLKSVIRQYGTQEDYNKMFRSEESGTYSAYVNSYNSGKKQRRDMKGRTREDFYKSLKKLLKGMPEEDENVAQILAEIDKEKFLPKQLTASNGVIPNQVHLKEMKAILRNAEQYLPFLKEVDESGLTTSERIWRLFSFQIPYYVGPVTPNSSRDGGNGWVVRKEEGEVLPWNINEKIDLPATQDAFIKRLVRECTYISGEKVLPKGALIYEKFAVLNEINNIRIDNERLDTPLKQAIYNDLFCTGKRITRKKILDYLSAQGKLKNESQLTGIDKNINNSLSSYGKFLGVFGEDLKKDHYIDMSEDIIYWCTVYGDSKKVLRSLLEEKYQGELTEKQMKRILGFKFGDWGRMSREFLELEGIDKETGEVVTLIHAMWDNSMNMMELIHSDRFTFAESLESKKTKMDKTLSEFKHEDLDEYYFSAPVKRMIWQTLLVIKELEKVLGGPPTRLFVEMTRSDDVKGDKGRKKSRKDELLELYKKVKDESHDWTAIINAADENGTIRSKKMYLYLTQRGRCMYTGKPIDLNQLFDNNIYDIDHIYPRHFVKDDNLRNNLVLVDKRANARKSDNYPIDSNIRCNDSIKALWYSLKKEKLISEEKYRRLTGSNPFSDEQKAGFIARQMVETSQATKGVNDLLKQLLPETELVYSKASNVSDFRRDYDLLKSRTINDFHHANDAYLNIVVGNVFLVKFTNNPRNFIKEYNRDKYTYGYNLGRIFERDVKRGDQVAWIADDRNGNHGTIETVKKMMAKHTPLLTRMNFVNNGQISKGTLYSKFKAKPDTYIPLKETDEKMRDISKYGGFTNVSTAYFFLVEHGKANKRIRTIEAVPIYMKSRLENNEEELKKYCVEQLGLLDPSIRLNKIKIQSQFRINGFYVFFRGKTGHELLWGNNTSLCLEPKWNNYISYLDKYAKNGYMNRFITKEENEHLYSELLKKHSEAIFSKRPNSFSKIVIAGQEKFKDLDIEKQCVALSQLISATSIGSSIADVTMIGGTAQTGRMRTNKKISGYELVLINTSATGLYKTEIDLNKI

SEQ ID NO: 3178 - protein, 1123 aa, unidentified
  REGION 1..1123: note = Description of Unknown: uncultivated organism sequence
  REGION 1..1123: note = Category: MG91 effectors
  REGION 1..1123: note = Description: MG91-370 effector
MSKKILSLDLGITSIGYSVLDEMQNDRYRLLDYGVSMFDKATDKDGNSKKLLHSINSSTANLYALRKKRKQNLASLFEAFGLGEKTTLLQQEKNNLYKNKWQLRAKKAFEEKLEVGELFTIFYALAKHRGYKSLESGDLLEELCEKLGIEVQSASKQKKDDDEKGKIKKALKTIENFRVENPEKTVAQIIYEAEIKKENPTFRNHDNYNYMIRREYINDEIGKIIKMQENFGFFECSFDVDLFITKLIATIDDQKDSTNDLNFFGNCQYYDDEKAAHQYSLLSDIFKMYESVANITFNAKPVVKITKEQIQLITDDFFKKIVKGKNVTEIKYKDIRKILQLSDDMKIFNKEDSRIIKGKKSDNTIIKFHFLNNLSKINNNFITKALEQENKYEILKEIFDVLAYEKAPHTIFENLKNKIEDEQTIIDLIRYKSGNSMNISHYAMMQFIPYFEEGFTTDAIKEKLGLDRQEDYSKFKKGIKYLHVNNFEKDDKLEINNHPVKSVVSATMRVVKHLHATHGAFDEIRVESTRELSQNEETKKEIEKANKALQKEIDTIVNNKEYQEIAKSYGKNLKKYARKILMYLAQEGRDIYSGKGIEIADIFTNSVDLDHIVPKSLGGLSVKHNLVLAHRNTNVQKSNQLPLNFVADKQAFINRVEYLFSEHKINWKKRKNLLATNLDETFQDIFESKSLRATSYIEALTAQMLKRYYPFANEKKRVDGSAVRHIQGRATSNIRKLLHVKIKVRDTNIHHAIDAILIGLTNQSWLQKLSNTFRENMGIIDDEARAKIKKEIPLIEGIEPQELIEMIEDRYNVFGEESVFYKDIWGKTKVINFWISKKPMVSKIHKDTIYAKKPNGFYTVRESIINKFGGLKITPKTSSEEFIKIFKKNILHKMYLYKTNPKDTMCQIIQKRGEAIATLLDSFTDFDSKNKEQMSEAKMALDSLIHSDLVDNNGNIVRKVKFYQTNLTGFDVRGGLATKEKTFIGFQSWLENEKLHYKRIDVANFKKIKKQNDGNFQVFKNDIVFFVYPNGSFRGGKIVSFLEENKTGAFQNSKFPMSLKYQPEIFCELNKEKKHVKTKPRSIGKSTGIIKLNLDIIGNIKSYTCIGKIESEILDFIKASVNG

SEQ ID NO: 3179 - protein, 1342 aa, unidentified
  REGION 1..1342: note = Description of Unknown: uncultivated organism sequence
  REGION 1..1342: note = Category: MG91 effectors
  REGION 1..1342: note = Description: MG91-371 effector
MRYFMGLDMGTSSVGWAVTDEHYQLLRRKGKDMWGIREFEEAATAVERRTHRVSRRRRQRQVARIGLLQEYFHDAIHQVDPNFYQRLKNSKYHEEDKDEIVRESNGIFNDAEYTDKEYFKEFPTIFHLRQELIKSKEPHDVRLVYLALLNMFKHRGHFLNATLSADGESRKIKDIYTDFVDKAAEQLGVSFATDIRYEKLENYLSSNDLSRKRKGELIAELLHVTRKDKQQYALIECMLGLDKSVKLMFGDTLPEDFDKTIKVNFSDIAFEEKATEISEAIGEEKYDLILIMKEIYDAAILNRIMNGYTYLSDARVAEYEKHKSDLACLKHYIKEYGTQHQFDFLFRGTEKGSYSAYVHSVNSHEKQRRNMDGNKKEDLYSTLKKILKDMPENEEKTYIMMQIELDNFLPKQLTASNGVIPNQIHLKEMKKILANAENYLPFLKEKDESGYTVSERIQKLFAFQIPYYIGPTTEKSAEFGGNGWVVRKEEGKVLPWNIDQKIDMKKTSEEFISRMVRRCTYMNDEQVLPKESLEYESFCVLNELNNIKVYGEKLPVDIKQDIYRTLCEKGKRITKKSLMKYLVGRGVIKAEDEAQLTGLMDGLNNTLKSFAKFKAIFGDAIYEDSCKKMVEQIIFWCTVYGDSKHFLKEQLLEKYGEVLTDAQIKRILGIKFRDWGNLSKKFLELQGCSKETGEVNSLIRMLWETNDNLMELLAQDSYTFKEELENMQESTYKVLTELQLEDLDHMYFSAPVKRMIWQTILIIKEVTKVMGCQPERLFIEMTREHGQKNDIKDSRAKKFYELYSKIKDEDKDWRKVIEDADKDGKIRSKKMYLYLTQMGRCMYTGRPIDLDQLFNNNLYDIDHIYPRHYVKDDNLENNMVLVEKQSNAHKSDVYPLESGIYEKQVNWWRELHRKNLINDEKLKRLTGRNPFTDEQKAGFIARQLVETSQGTKGVATILQEALPDTTLVYAKARNVSDFRKDNDLLKSRIVNDFHHAHDAYLNIVIGNVYYVKFTKNPINFIREHGTYNLGKMFAKDVKRGDDIGWVAQSGNGQTATMETIKRTMARNTPLLTRMSYEVTGGLANQTLYSASKAKEGTYIPLKSSDERMQDVTKYGGFTSVSTAYFMLVEHDGKKGKRIRTIESVPIMWKERIEKNPAELERYCLEVLKLSNPDIRVRKILIQSLIKRNGYYMQITGKTGNRMYVRNMVSLCLVQDWVNYIKKLEKDKDENISKEKNIRLYDVLMDKHINTIYNTRPNPVGDLLIKRRSDFIELKITDQVIILLEILKLTQTALGSANLKLIGEAEKTGVMLISKDITALDEMLLINQSVTGLYEQRVNLLTV

SEQ ID NO: 3180 - protein, 1358 aa, unidentified
  REGION 1..1358: note = Description of Unknown: uncultivated organism sequence
  REGION 1..1358: note = Category: MG91 effectors
  REGION 1..1358: note = Description: MG91-372 effector
MEKEYYLGLDMGTNSVGWAVTDDAYNLIRFKGKDMWGIREFDEANPAVERRTHRTSRRRKQRNAVRMGLIRSYFADEIQKVDSNFYQRLDNSFFHVEDKQDNVKDKNGIFNDKNYKDADYYKQYPTIFHLRKELIEDASQKDVRLVYLAVANMFKHRGHFLLSGIGSESSKQTITDLYNQVSGLITEEYGISLKTDIAGTDFEQVLCSREYSRTRKSEKVCEILEIKNSDKLKKAFVKSMCGLSVKITDIIDDTFTEISDEDKKITFSFVDSDYDEKAGVLEEKLGTDVYDIISKLKEIHDKAQVAEIMKNYQYLSFARVADYEKHKKDLKILKRVVKKYFEPTVYDKLFRSEENGTYSAYVNSFNSEEKSRRNYKERKQEDLYNSIKKLLKSVDNVDDTDIEYIKNEMDKENFLPKQLTFKNGVIPNQIHASELKAILKNAEKYLPFLNEKDESGYTVSERILMLFSFQIPYYVGPVSPNSNGWVKRLEPGQVLPWNIDKKIDLKETSEQFIQRMVRNCTYIAGEKVLPKASLLYENFKVLNEINNLSISGERIAVALKQDLYNTLFLKGKRVTRKQIFNYFHSRGLVEEDSQISGIDIAVNNSLSTYGKFLPLFGDHLKEDKYKKMVDDIVFWCTVYGDSRKFLREQLEEKYSDVLDENQIKRITGMKFKDWGNLSKEFLELSGCCKSTGEMMPLIRAMWETNYNLMELLHSEEFTYSEELEEKQGKIEKVLSEYTIDDLNEEYFSAPVKRMVWQTLLIIKEIEKIMKCPPTRIFVEMTRKDDEKGDNGRKSSRKDQLLALYKKIQSEDKEWKKEMSSRIEDYDKNGALRSKKLYLYFIQKGLDMYTGKPIDLDNLMSANSNYDIDHIYPRHFVKDDNINNNLVLASKPANAEKSDIYPIKDSIYQKMKYTWKVLRDEGLITEEKYKRLTGRNPFTDEQKAGFIARQLVETGQGTKGVADLLTALLPDTKLVYSKAGNVSDFRKKYDIPKSRLINDFHHAHDAYLNIVVGNIYFTKFTSNPLNYIRKECSSKDNKYQYNLGNMYKWDVKRDGKTAWIAAKEGETGTIATVKKMLSRNTPTLTRLTIEGPGGIADATLYSHKKAKQDAYIPLKSSDARMADVTKYGGYSSVTTAYLFLVEHEIKGKKIRTLETVPLYLKDRLENSKEKLEEYCGETLGYTNPSVRMKKIKLQSLIKLNGYYMQISGKTNKQFTVRNYVQFCLNSKWVDYIHKLEKYQDKGVIDDAITDEKNVELYNVLCEKHSVGIFTLRPNPVGDKIKKGYDKFVNLTTEEQIKLLIEIIKLTCVGIVSANLTLIGGASISGKMLISKNITDAKECLLINQSVTGLYENRIDLLRV

SEQ ID NO: 3181 - protein, 1352 aa, unidentified
  REGION 1..1352: note = Description of Unknown: uncultivated organism sequence
  REGION 1..1352: note = Category: MG91 effectors
  REGION 1..1352: note = Description: MG91-373 effector
MTAFKYYLGLDMGTNSVGWAATDPGYRLLKAKGKDLWGIREFNEASGAVERRTHRISRRRRQREQVRIGILKDYFHDAICEVDPGFFQRLENSKYHEEDKDVEVRYKNNIFNDSNYTDKDYFNEYPTIYHLRNELISSTEKHDVRLVFLALLNMFKHRGHFLNAGLGENNGESNIDNAYFELTELLSELTEYHLSQDIDCKQIEAILSRRDMSRTHKAEELAGVLHVDLKNKPYKELIRGLCGLKFNACVVFPDVQSEEVTKLDICLSESSFDEKSDEIANIIGEDYFEIIMAMKEMFDIGSLASIMKGHNYLSQARVASYTKHKEDLKLLKEVIKKYCGKKEYDKFFNSDADGSYASYVGSYNSKNKERRVGNKRTSEELYKEIKKLLQDAPKEDENVQKILTSIENETFLPKQLTASNGVIPNQVHAREMKKILSNAENYLPFLTEKDETGLSVSERILKLFTFQIPYYVGPTSENSGKNGGNGWVVRREDGQVLPWNIDEKIDMKATSEAFISRMVRRCTYISGEQVLPKASLEYQSYCVLNEINNIKIDGERISVELKQDIYKAVFQKGKKVTKKQLCKYLHTRGIIETEEQVTGVDVSINNALTTYGKFKPIFGEDISKDSVQKMIEDIVFWCTVYGDSKKFLKDRIEEKYGNKLSEEQIKRILGFKFKDWGNLSKKFLELNGADTSTGESISIIRALWNNNLNLMELINSSLYNYKECLAEYQNTMLKTLSEIEAEDLNEYYFSAPVRRIIWQTILVIKELVKVLGCEPERIFVEMTRKPDEHKTRTSSRRNKFEELYKKVKDEATDWMQVIAKAEEDGKIRSKKMYLYLTQKGRCMYTGKHIELDDLFDKNLYDIDHIYPRHFVKDDNIDNNLVLVCKEKNAHKSDHYPIEEEIFLSQKKMWLELRKSGFITEEKYNRLMGRSPFSDEQKAGFIARQLVETSQGTKGVANILRQLLPGSKIVYAKASNVSEFRHTRDDIPKSRLVNDFHHAHDAYLNIVVGNVYYVKFTQNPLNFIKKDYDKYKEDYNLSKMFDWDVKRNGEVAWIAQRKDGEAGTITTVKRMLSRNTPLMTRYSFEGKGGLENETLCSAKKAKGEGYIPFKSSDDKMQDVTKYGGFTKVTGAYFFLVEHTEKKKRIRTIESVPVYLAQKIEQNPDELKKYCEEILGLVDADIRLKKIKIGSLIKRNGYFCYITGKTGNRLSVRNAVNLCLKNEWIKYISKLEKVKEKDAVDEIITKEKNEVLYSELIQKFKHGIFSKRPNPVEDKLEKGSEKFSNLSIKEQCAVLCQILQLAAVLGSECDMTLLGESAHCGKMLISKKIGDEEIYLLNQSVTGLYEKKINLHTV

SEQ ID NO: 3182 - protein, 1352 aa, unidentified
  REGION 1..1352: note = Description of Unknown: uncultivated organism sequence
  REGION 1..1352: note = Category: MG91 effectors
  REGION 1..1352: note = Description: MG91-374 effector
MTAFKYYLGLDMGTNSVGWAATDPGYRLLKAKGKDLWGIREFNEASGAVERRTHRISRRRRQREQVRIGILKDYFHDAICEVDPGFFQRLENSKYHEEDKDVEVRYKNNIFNDGNYTDKDYFNEYPTIYHLRNELISSTEKHDVRLVFLALLNMFKHRGHFLNAGLGENNGESNIDNAYFELTELLSELTEYHLSQDIDCKQIEAILSRRDMSRTHKAEELAGVLHVDLKNKPYKELIRGLCGLKFNACVVFPDVQSEEVTKLDICLSESTFDEKSDEIANIIGEDYFEIIMAMKEMFDIGSLASIMKGHNYLSQARVASYTKHKEDLKLLKEVIKKYCSKKEYDKFFNSDADGSYASYVGSYNSKNKERRVGNKRTSEELYKEIKKLLKDAQKEDENVQKILTSIENETFLPKQLTASNGVIPNQVHAREMKKILSNAENYLPFLTEKDETGLSVSERILKLFTFQIPYYVGPTSENSGKNGGNGWVVRREDGQVLPWNIDEKIDMKATSEAFISRMVRRCTYISGEQVLPKASLEYQSYCVLNEINNIKIDGERISVELKQDIYKAVFQKGKKVTKKQLCKYLHTRGIIETEEQVTGVDVSINNALTTYGKFKPIFGEDISKDSVQKMIEDIVFWCTVYGDSKKFLKDRIEEKYGNKLSEEQIKRILGFKFKDWGNLSKKFLELNGADTSTGESISIIRALWNNNLNLMELINSSLYNYKECLAEYQNTMLKTLSEIEAEDLNEYYFSAPVRRMIWQTILVIKELVKVLGCEPERIFVEMTRKPDEHKTRTSSRRNKFEELYKKVKDETTDWMQVIANAEEDGKIRSKKMYLYLTQKGRCMYTGKHIELDDLFDNNLYDIDHIYPRHFVKDDNIDNNLVLVCKEKNAHKSDHYPIEEEIFLSQKKMWLELRKSGFITEEKYNRLMDRNPFSDEQKAGFIARQLVETSQGTKGVANILRQLLPGSKIVYAKASNVSEFRCTRDDIQKSRLVNDFHHAHDAYLNIVVGNVYYVKFTQNPLNFIKKDYDKYKEDYNLSKMFDWDVKRNGEVAWIAQRKDGAAGTITTVKRMLSRNTPLMTRYSFDGKGGLTNETLYSAKKAKGEGYIPFKSSDDKMQDVTKYGGFTSVTGAYFFLVEHTEKKKRIRTIESVPVYLAQKIEQNPDELKKYCEEILGLIDADIRLKKIKIGSLIKRNGYFCYITGKTGNRLIVRNAVNLCLKNEWIKYISKLEKVKEKDAVDKIITKEKNEVLYSELIQKFKHGIFSKRPNPVGDKLEKDSEKFNNLSIKDQCAVLCQVLRMAAILGSECDMTLLGDSPNCGKMLISKKIGDEEIYLINQSVTGLYEKKINLHTV

SEQ ID NO: 3183 - protein, 1358 aa, unidentified
  REGION 1..1358: note = Description of Unknown: uncultivated organism sequence
  REGION 1..1358: note = Category: MG91 effectors
  REGION 1..1358: note = Description: MG91-375 effector
MEKEYYLGLDMGTNSVGWAVTDDAYNLIRFKGKDMWGIREFDEANPAVERRTHRTSRRREQRNAVRMGLIRSYFADEIQKVDSNFYQRLDNSFFHVEDKQDNVKDKNGIFNDKNYKDADYYKQYPTIFHLRKELIEDASQKDVRLVYLAVANMFKHRGHFLLSGIGSESSKQTITDLYNQVSGLITEEYGISLKTDIAGTDFEQVLCSREYSRTRKSEKVCEILEIKNSDKLKKAFVKSMCGLSVKITDIIDDTFTEISDEDKKITFSFVDSDYDEKAGVLEEKLGTDVYDIISKLKEIHDKAQVAEIMKNYQYLSFARVADYEKHKKDLKILKRVVKKHFEPTVYDKLFRSEENGTYSAYVNSFNSEEKSRRNYKERKQEDLYNSIKKLLKSVDNVDDTDIEYIKNEMDKENFLPKQLTFKNGVIPNQIHASELKAILKNAEKYLPFLNEKDESGYTVSERILMLFSFQIPYYVGPVSSNSNGWVKRLESGQVLPWNIDKKIDLKETSEQFIQRMVRNCTYIAGEKVLPKASLLYENFKVLNEINNLSINGERIAVALKQDLYNTLFLKGKRVTRKQIFNYFHSRGLVEEDSQISGIDIAVNNSLSTYGKFLPLFGEHLKEDKYKKMVDDIVFWCTVYGDSRKFLREQLEEKYSDVLDENQIKRITGMKFKDWGNLSKEFLELLGCCKSTGEMIPLIRAMWETNYNLMELLHSEEFTYSEELEEKQGKIEKVLSEYTIDDLNEEYFSAPVKRMVWQTLLIIKEIEKIMKCPPTRIFVEMTRKDDEKGDNGRKSSRKDQLLALYKKIQSEDKEWKKEMSSRIEDYDKNGALRSKKLYLYFIQKGLDMYTGKPIDLDNLMSANSNYDIDHIYPRHFVKDDNINNNLVLASKPANAEKSDIYPIKDSIYQKMKYTWKVLRDEGLITEEKYKRLTGRNPFTDEQKAGFIARQLVETGQGTKGVADLLTALLPDTKLVYSKAGNVSDFRKRYDIPKSRLINDFHHAHDAYLNIVVGNIYFTKFTSNPLNYIRKECSSKDNKYQYNLGNMYKWDVKRDGKTAWIAAKEGETGTLATVKKMLSRNTPILTRLAIEGHGGIADATLYSHKKAKQDAYIPLKSSDARMADVTKYGGYSSVTTAYLFLVEHEIKGKKIRTLETVPLYLKDRLENSKEKLEEYCRETLGYTNPSVRMKKIKLQSLIKLNGYYMQISGKTNKQFTVRNYVQFCLNSKWVDYIHKLEKYQDKGVIDDAITDEKNVELYNVLCEKHSVGIFTLRPNPVGDKIKKGYDKFVNLTTEEQIKLLIEIIKLTCVGIVSANLTLIGGASISGKMLISKNITDAKECLLINQSVTGLYENRIDLLRV

SEQ ID NO: 3184 - protein, 1358 aa, unidentified
  REGION 1..1358: note = Description of Unknown: uncultivated organism sequence
  REGION 1..1358: note = Category: MG91 effectors
  REGION 1..1358: note = Description: MG91-376 effector
MEKEYYLGLDMGTNSVGWAVTDDAYNLIRFKGKDMWGIREFDEANPAVERRTHRTSRRREQRNAVRMGLIRSYFADEIQKVDSNFYQRLDNSFFHVEDKQDNVKDKNGIFNDKNYKDADYYKQYPTIFHLRKELIEDASQKDVRLVYLAVANMFKHRGHFLLSGIGSESSKQTITDLYNQVSGLITEEYGISLKTDIAGTDFEQVLCSREYSRTRKSEKVCEILEIKNSDKLKKAFVKSMCGLSVKITDIIDDTFTEISDEDKKITFSFVDSDYDEKAGVLEEKLGTDVYDIISKLKEIHDKAQVAEIMKNYQYLSFARVADYEKHKKDLKILKRVVKKYFEPTVYDKLFRSEENGTYSAYVNSFNSEEKSRRNYKERKQEDLYNSIKKLLKSVDNVDDTDIEYIKNEMDKENFLPKQLTFKNGVIPNQIHASELKAILKNAEKYLPFLNEKDESGYTVSERILMLFSFQIPYYVGPVSSNSNGWVKRLEPGQVLPWNIDKKIDLKETSEQFIQRMVRNCTYIAGEKVLPKASLLYENFKVLNEINNLSINGERITVNLKQDLYNTLFLKGKRVTRKQIFNYFHSRGLVEEDSQISGIDIAVNNSLSTYGKFLPLFGEHLKEDKYKKMVDDIVFWCTVYGDSRKFLREQLEEKYSDVLDENQIKRITGMKFKDWGNLSKEFLELSGCCKSTGEVMPLIRAMWETNYNLMELLHSEEFTYSEELEEKQGKIEKVLSEYTIDDLNEEYFSAPVKRMVWQTLLIIKEIEKIMKCPPTRIFVEMTRKDDEKGDNGRKSSRKDQLLALYKKIQSEDKEWKKEMSSRIEDYDKNGALRSKKLYLYFIQKGLDMYTGKPIDLDNLMSANSNYDIDHIYPRHFVKDDNINNNLVLASKPANAEKSDIYPIKDSIYQKMKYTWKVLRDEGLITEEKYKRLTGRNPFTDEQKAGFIARQLVETGQGTKGVADLLTALLPDTKLVYSKAGNVSDFRKRYDIPKSRLINDFHHAHDAYLNIVVGNIYFTKFTSNPLNYIRKECSSKDNKYQYNLGNMYKWDVKRDGKTAWVAPEEGETGTLATVKKMLSRNTPILTRLTIEGHGGIADATLYSHKKAKQDTYIPLKSSDARMADVTKYGGYSSVTTAYLFLVEHEIKGKKIRTLETVPIYLKDRLENSKEKLEEYCRETLGYTNPSVRMKKIKLQSLIKLNGYYMQISGRTGNRFTLRNYVQLCLNGKWVDYIHKLEKYQDKGVIDDLITDERNVELYNVLCEKHSVGIFTLRPNLVGDKIKNGYDKFVNLTTEEQIKLLIEIIKLTCVGIVSANLTLIGGAAISGKMLMSKNITYANECILINQSVTGLYENRIDLLGV

SEQ ID NO: 3185 - protein, 1358 aa, unidentified
  REGION 1..1358: note = Description of Unknown: uncultivated organism sequence
  REGION 1..1358: note = Category: MG91 effectors
  REGION 1..1358: note = Description: MG91-377 effector
MEKEYYLGLDMGTNSVGWAVTDDAYNLIRFKGKDMWGIREFDEANPAVERRTHRTSRRREQRNAVRMGLIRSYFADEIQKVDSNFYQRLDNSFFHVEDKQDNVKDKNGIFNDKNYKDADYYKQYPTIFHLRKELIEDASQKDVRLVYLAVANMFKHRGHFLLSGIGSESSKQTITDLYNQVSGLITEEYGISLKTDIAGTDFEQVLCSREYSRTRKSEKVCEILEIKNSDKLKKAFVKSMCGLSVKITDIIDDTFTEISDEDKKITFSFVDSDYDEKAGVLEEKLGTDVYDIISKLKEIHDKAQVAEIMKNYQYLSFARVADYEKHKKDLKILKRVVKKYFEPTVYDKLFRSEENGTYSAYVNSFNSEEKSRRNYKERKQEDLYNSIKKLLKSVDNVDDTDIEYIKNEMDKENFLPKQLTFKNGVIPNQIHASELKAILKNAEKYLPFLNEKDESGYTVSERILMLFSFQIPYYVGPVSSNSNGWVKRLEPGQVLPWNIDKKIDLKETSEQFIQRMVRNCTYIAGEKVLPKDSLLYENFKVLNEINNLSINGERITVNLKQDLYNTLFLKGKRVTRKQIFNYFHSRGLVEEDSQISGIDIAVNNSLSTYGKFLPLFGEHLKEDKYKKMVDDIVFWCTVYGDSRKFLREQLEEKYSDVLDENQIKRITGMKFKDWGNLSKEFLELSGCCKSTGEVMPLIRAMWETNYNLMELLHSEEFTYSEELEEKQGKIEKVLSEYTIDDLNEEYFSAPVKRMVWQTLLIIKEIEKIMKCPPTRIFVEMTRKDDEKGDNGRKSSRKDQLLALYKKIQSEDKEWKKEMSSRIEDYDKKGALRSKKLYLYFIQKGLDMYTGKPIDLDNLMSANSNYDIDHIYPRHFVKDDNINNNLVLASKPANAEKSDIYPIKDSIYQKMKYTWKVLRDEGLITEEKYKRLTGRNPFTDEQKAGFIARQLVETGQGTKGVADLLTALLPDTKLVYSKAGNVSDFRKKYDIPKSRLINDFHHAHDAYLNIVVGNIYFTKFTSNPLNYIRKECSSKDNKYQYNLGNMYKWDVKRDGKTAWIAAKEGETGTIATVKKMLSRNTPTLTRLTIEGHGGIADATLYSHKKAKQDAYIPLKSSDARMADVTKYGGYSSVTTAYLFLVEHEIKGKKIRTLETVPLYLKDILENSKEKLEEYCRETLGYTNPSVRMKKIKLQSLIKLNGYYMQISGKTNKQFTVRNYVQFCLNSKWVDYIHKLEKYQDKGVIDDAITDEKNVELYNVLCEKHSVGIFTLRPNPVGDKIKKGYDKFVNLTTEEQIKLLIEIIKLTCVGIVSANLTLIGGASISGKMLISKNITDAKECLLINQSVTGLYENRIDLLRV

SEQ ID NO: 3186 - protein, 1358 aa, unidentified
  REGION 1..1358: note = Description of Unknown: uncultivated organism sequence
  REGION 1..1358: note = Category: MG91 effectors
  REGION 1..1358: note = Description: MG91-378 effector
MEKEYYLGLDMGTNSVGWAVTDDAYNLIRFKGKDMWGIREFDEANPAVERRTHRTSRRREQRNAVRMGLIRSYFADEIQKVDSNFYQRLDNSFFHVEDKQDNVKDKNGIFNDKNYKDADYYKQYPTIFHLRKELIEDASQKDVRLVYLAVANMFKHRGHFLLSGIGSESSKQTITDLYNQVSGLITEEYGISLKTDIAGTDFEQVLCSREYSRTRKSEKVCEILEIKNSDKLKKAFVKSMCGLSVKITDIIDDTFTEISDEDKKITFSFVDSDYDEKAGVLEEKLGTDVYDIISKLKEIHDKAQVAEIMKNYQYLSFARVADYEKHKKDLKILKRVVKKYFEPTVYDKLFRSEENGTYSAYVNSFNSEEKSRRNYKERKQEDLYNSIKKLLKSVDNVDDTDIEYIKNEMDKENFLPKQLTFKNGVIPNQIHASELKAILKNAEKYLPFLNEKDESGYTVSERILMLFSFQIPYYVGPVSSNSNGWVKRLEPGQVLPWNIDKKIDLKETSEQFIQRMVRNCTYIAGEKVLPKASLLYENFKVLNEINNLSINGERITVNLKQDLYNTLFLKGKRVTRKQIFNYFHSRGLVEEDSQISGIDIAVNNSLSTYGKFLPLFGEHLKEDKYKKMVDDIVFWCTVYGDSRKFLREQLEEKYSDVLDENQIKRITGMKFKDWGNLSKEFLELSGCCKSTGEMIPLIRAMWETNYNLMELLHSEEFTYSEELEEKQGKIEKVLSEYTIDDLNEEYFSAPVKRMVWQTLLIIKEIEKIMKCHPTRIFIEMTRKDDEKGDNGRKSSRKDQLLALYKKIQSEDKEWKKEMSSRIEDYDKNGALRSKKLYLYFIQKGLDMYTGKPIDLDNLMSANSNYDIDHIYPRHFVKDDNINNNLVLASKPANAEKSDIYPIKDSIYQKMKYTWKVLRDEGLITEEKYKRLTGRNPFTDEQKAGFIARQLVETGQGTKGVADLLTALLFDTKLVYSKAGNVSDFRKRYDIPKSRLINDFHHAHDAYLNIVVGNIYFTKFTSNPLNYIRKECSSKDNKYQYNLGNMYKWDVKRDGKTAWIAAKEGETGTIATVKKMLSRNTPTLTRLTIEGHGGIADATLYSHKKAKQDAYIPLKSSDARMADVTKYGGYSSVTTAYLFLVEHEIKGKKIRTLETVPLYLKDRLENSKEKLEEYCRETLGYTNPSVRMKKIKLQSLIKLNGYYMQISGKTNKQFTVRNYVQFCLNSKWVDYIHKLEKYQDKGVIDDAITDEKNVELYNVLCEKHSVGIFTLRPNPVGDKIKKGYDKFVNLTTEEQIKLLIEIIKLTCVGIVSANLTLIGGASISGKMLISKNITDAKECLLINQSVTGLYENRIDLLRV

SEQ ID NO: 3187 - protein, 1358 aa, unidentified
  REGION 1..1358: note = Description of Unknown: uncultivated organism sequence
  REGION 1..1358: note = Category: MG91 effectors
  REGION 1..1358: note = Description: MG91-379 effector
MEKEYYLGLDMGTNSVGWAVTDDAYNLIRFKGKDMWGIREFDEANPAVERRTHRTSRRREQRNAVRMGLIRSYFADEIQKVDSNFYQRLDNSFFHVEDKQDIVKDKNGIFNDKNYKDADYYKQYPTIFHLRKELIEDASQKDVRLVYLAVANMFKHRGHFLLSGIGSESSKQTITDLYNQVSGLITEEYGISLKTDIAGTDFEQVLCSREYSRTRKSEKVCEILEIKNSDKLKKAFVKSMCGLSVKITDVIDDTFTEISDEDKKITFSFVDSDYDEKAGVLEEKLGTDVYDIISKLKEIHDKAQVAEIMKNYQYLSFARVADYEKHKKDLKILKRVVKKYFEPTVYDKLFRSGENGTYSAYVNSFNSGEKSRRNYKERKQEDLYNSIKKLLKYIDNVCDTDIEYIKNEIEKENFLPKQLTFKNGVIPNQIHASELKAILKNAEKYLPFLNEKDESGYTVSERILMLFSFQIPYYVGPVSPNSNGWVKRLEPGQVLPWNIDKKIDLKETSEQFIQRMVRNCTYIAGEKVLPKASLLYENFKVLNEINNLSINGERIAVALKQDLYNTLFLKGKRVTRKQIFNYFHSRGLVEEDSQISGIDIAVNNSLSTYGKFLPLFGEHLKEDKYKKMVDDIVFWCTVYGDSRKFLREQLEEKYSDVLDENQIKRITGMKFKDWGNLSKEFFELLGCCKSTGEMIPLIRAMWETNYNLMELLHSEEFTYSEELEEKQGKIEKVLSEYTIDDLNEEYFSAPVKRMVWQTLLIIKEIEKIMKCPPTRIFVEMTRKDDEKGDNGRKSSRKDQLLALYKKIQSEDKEWKKEMSSRIEDYDKNGALRSKKLYLYFIQKGLDMYTGKPIDLDNLMSANSNYDIDHIYPRHFVKDDNINNNLVLASKPANAEKSDIYPIKDSIYQKMKYTWKVLRDEGLITEEKYKRLTGRNPFTDEQKAGFIARQLVETGQGTKGVADLLTALLPDTKLVYSKAGNASDFRKKYDIPKSRLINDFHHAHDAYLNIVVGNIYFTKFTSNPLNYIRKECSSKDNKYQYNLGNMYKWDVKRDGKTAWIAAKEGETGTLATVKKMLSRNTPILTRLAIEGHGGIADATLYSHKKAKQDAYIPLKSSDARMADVTKYGGYSSVTTAYLFLVEHEIKGKKIRTLETVPLYLKDRLENSKEKLEEYCRETLGYTNPSVRMKKIKLQSLIKLNGYYMQISGKTNKQFTVRNYVQFCLNSKWVDYIHKLEKYQDKGVIDDAITDEKNVELYNVLCEKHSVGIFTLRPNPVGDKIKKGYDKFVNLTTEEQIKLLIEIIKLTCVGIVSANLTLIGGAAISGKMLISKNITDAKECLLINQSVTGLYENRIDLLRV

SEQ ID NO: 3188 - protein, 1352 aa, unidentified
  REGION 1..1352: note = Description of Unknown: uncultivated organism sequence
  REGION 1..1352: note = Category: MG91 effectors
  REGION 1..1352: note = Description: MG91-380 effector
MTAFKYYLGLDMGTNSVGWAATDPGYRLLKAKGKDLWGIREFNEASGAVERRTHRISRRRRQREQVRIGILKDYFHDAICEVDPGFFRRLENSKYHEEDKDVEVRYKNNIFNDSNYTDKDYFNEYPTIYHLRNELISSTEKHDVRLVFLALLNMFKHRGHFLNAGLGENNGESNIDNVYFELTELLSELTEYHLSQDIDCKQIEAILSRRDMSRTHKAEELAGVLHVDLKNKPYKELIRGLCGLKFNACVVFPDVQSEEVTKLDICLSESTFDEKSDEIANIIGEDYFEIIMAMKEMFDIGSLASIMKGHNYLSQARVASYTKHKEDLKLLKEVIKKYCGKKEYDKFFNSDADGSYASYVGSYNSKNKERRVGNKRTSEELYKEIKKLLKDAQKEDENVQKILTSIENETFLPKQLTASNGVIPNQVHAREMKKILSNAENYLPFLTEKDETGLSVSERILKLFTFQIPYYVGPTSENSGKNGGNGWVVRREDGQVLPWNIDEKIDMKATSEAFISRMVRRCTYISGEQVLPKASLEYQSYCVLNEINNIKIDGERISVELKQDIYKAVFQKGKKVTKKQLCKYLHTRGIIETEEQVTGVDVSINNALTTYGKFKPIFGEDISKDSVQKMIEDIVFWCTVYGDSKKFLKDRIEEKYGNKLSEEQIKRILGFKFKDWGNLSKKFLELNGADTSTGESISIIRALWNNNLNLMELINSSLYNYKECLAEYQNTMLKTLSEIEAEDLNEYYFSAPVRRIIWQTILVIKELVKVLGCEPERIFVEMTRKPDEHKTRTSSRRNKFEELYKKVKDEATDWMQVIAKAEEDGKIRSKKMYLYLTQKGRCMYTGKHIELDDLFDKNLYDIDHIYPRHFVKDDNIDNNLVLVCKEKNAHKSDHYPIEEEIFLSQKKMWLELRKSGFITEEKYNRLMGRSPFSDEQKAGFIARQLVETSQGTKGVANILRQLLPGSKIVYAKASNVSEFRHTRDDIPKSRLVNDFHHAHDAYLNIVVGNVYYVKFTQNPLNFIKKDYDKYKEDYNLSKMFDWDVKRNGEVAWIAQRKDGEAGTITTVKRMLSRNTPLMTRYSFEGKGGLANETLCSAKKAKGEGYIPFKSSDDKMQDVTKYGGFTKVTGAYFFLVEHTEKKKRIRTIESVPVYLAQKIEQNPDELKKYCEEILGLVDADIRLKKIKIGSLIKRNGYFCYITGKTGNRLSVRNAVNLCLKNEWIKYISKLEKVKEKDAVDEIITKEKNEVLYSELIQKFKHGIFSKRPNPVEDKLEKGSEKFSNLSIKEQCAVLCQILQLAAVLGSECDMTLLGESAHCGKMLISKKIGDEEIYLLNQSVTGLYEKKINLHTV

SEQ ID NO: 3189 - protein, 1358 aa, unidentified
  REGION 1..1358: note = Description of Unknown: uncultivated organism sequence
  REGION 1..1358: note = Category: MG91 effectors
  REGION 1..1358: note = Description: MG91-381 effector
MEKEYYLGLDMGTNSVGWAVTDDAYNLIRFKGKDMWGIREFDEANPAVERRTHRTSRRREQRNAVRMGLIRSYFADEIQKVDSNFYQRLDNSFFHVEDKQDNVKDKNGIFNDKNYKDADYYKQYPTIFHLRKELIEDASQKDVRLVYLAVANMFKHRGHFLLSGIGSESSKQTITDLYNQVSGLITEEYGISLKTDIAGTDFEQVLCSREYSRTRKSEKVCEILEIKNSDKLKKAFVKSMCGLSVKITDIIDDTFTEISDEDKKITFSFVDSDYDEKAGVLEEKLGTDVYDIISKLKEIHDKAQVAEIMKNYQYLSFARVADYEKHKKDLKILKRVVKKYFEPTVYDKLFRSEENGTYSAYVNSFNSEEKSRRNYKERKQEDLYNSIKKLLKSVDNVDDTDIEYIKNEMDKENFLPKQLTFKNGVIPNQIHASELKAILKNAEKYLPFLNEKDESGYTVSERILMLFSFQIPYYVGPVSSNSNGWVKRLESGQVLPWNIDKKIDLKETSEQFIQRMVRNCTYIAGEKVLPKASLLYENFKVLNEINNLSINGERITVNLKQDLYNTLFLKGKRVTRKQIFNYFHSRGLVEEDSQISGIDIAVNNSLSTYGKFLPLFGEHLKEDKYKKMVDDIVFWCTVYGDSRKFLREQLEEKYSDVLDENQVKRITGMKFKDWGNLSKEFLELSGCCKSTGEMIPLIRAMWETNYNLMELLHSEEFTYSEELEEKQGKIEKVLSEYTIDDLNEEYFSAPVKRMVWQTLLIIKEIEKIMKCHPTRIFIEMTRKDDEKGDNGRKSSRKDQLLALYKKIQSEDKEWKKEMSSRIEDYDKNGALRSKKLYLYFIQKGLDMYTGKPIDLDNLMSANSNYDIDHIYPRHFVKDDNINNNLVLASKPANAEKSDIYPIKDSIYQKMKYTWKVLRDEGLITEEKYKRLTGRNPFTDEQKAGFIARQLVETGQGTKGVADLLTALLPDTKLVYSKAGNVSDFRKRYDIPKSRLINDFHHAHDAYLNIVVGNIYFTKFTSNPLNYIRKECSSKDNKYQYNLGNMYKWDVKRDGKTAWIAAKEGETGTIATVKKMLSRNTPTLTRLTIEGHGGIADATLYSHKKAKQDAYIPLKSSDARMADVTKYGGYSSVTTAYLFLVEHEIKGKKIRTLETVPLYLKDRLENSKEKLEEYCRETLGYTNPSVRMKKIKLQSLIKLNGYYMQISGKSIKQFEVRNYVQICLNGKWVDYIHKLEKYQDKGVIDNAITDEKNVELYNILCEKHSVGIFTLRPNPVGDKIKKGYDKFVNLTTEEQIKLLIEIIKLTCVGIVKADLRLIGASEKSGTMKINKNITDAKECFLINQSVTGLYENRIDLLRV

SEQ ID NO: 3190 - protein, 1022 aa, unidentified
  REGION 1..1022: note = Description of Unknown: uncultivated organism sequence
  REGION 1..1022: note = Category: MG91 effectors
  REGION 1..1022: note = Description: MG91-382 effector
MKSSIKKYCTKEEYNNFFNSDADGSYASYIGSFNSGNKERRVGSKRTSEDLYKEIKKLLKGANKSDPAINEIFTSIETESFLPKQLTASNGIIPNQVHSKEMARILTNAENYLPFLKETDENNLSISNRILQLYKFQIPYYIGPVTEKSQRDGGNGWVIRKDNGRVFPWNIEEKIDVKATSEAFISRMVRRCTYMNGKQVLPKASLEYESFRVLNEINNLRIDGERIPVTLKQDIYTDLFQKGKKVTKKQLCNYLATRGLIESSEQVTGIDIAINNSLSTYGKFKAIFGEDIKLDHIQHMIDDIVFWCTVYGDSKQFLKEQIEDKYKGKLSPEQMKRILGFKFKDWGNLSKEFFELKGADKSTGEAVSIIRALWENNLNLMELINSPEFDFKEQLADYEANSLKTLSDFEPEDLNDYYFSAPVRRMIWQTTLIIKELVHVLGKEPARIFIEMTREKDASRGRTLSRKKKFEDLYKNVKDENTDWAKVIEHADESGTIRSKKMYLYLTQKGRCMYTGNHIELSDLFNDNLYDIDHIYPRHFVKDDNIDNNLVLVTKEKNAHKSDNYPLEAEIFNKQRNMWTQLRKEGFISEEKYNRLMGRNAFTDEQKAGFIARQLVETSQGTKGVAELFHQLLPNSKIVYAKAGNVSDFRRNREFPKSRLVNDFHHAHDAYLNIVVGNVYYVKFTQNPINYIKNSYNKDMNKNNYNLSRMFDWDVKRGDEVAWIAQKQDGAAGTISTVKKMLSKNTPLMTRLSYEGKGALANETLYSAEKAKGEGYIPFKSSDTKIQDVTKYGGFTSVTGAYFFLVEHDEKKKRIRTIESVPLYLADKIDKDSSELERYCDKLGLVNYDVRVRKIKIGSLIKYNGYFCYITGKTGYRLIVRNATNLCLASNWRKYIKKIEKYKETTIIDNVITAEENIKLYNELLNKFTVGIFGRRPNPIGEKMDSARDKFASLSIENQCLALYQILQLTAILGNESDLQLIGASTHAGKMLISKKIGTDEIYLINQSPTGLFETKIDLQTI

SEQ ID NO: 3191 - protein, 1342 aa, unidentified
  REGION 1..1342: note = Description of Unknown: uncultivated organism sequence
  REGION 1..1342: note = Category: MG91 effectors
  REGION 1..1342: note = Description: MG91-383 effector
MRYFMGLDMGTSSVGWAVTDEHYQLLRRKGKDMWGIREFEEAATAVERRTHRVSRRRRQRQVARIGLLQEYFHDAIHQVDPNFYQRLKNSKYHEEDKDEIVRESNGIFNDAEYTDKEYFKEFPTIFHLRQELIKSKEPHDVRLVYLALLNMFKHRGHFLNATLSADGESRKIKDIYTDFVDKAAEQLGVSFATDIRYEELENYLSSNDLSRKRKGELIAELLHVTRKDKQQYALIECMLGLDKSVKLMFGDTLPEDFDKTIKVNFSDIAFEEKATEISEAIGEEKYDLILIMKEIYDAAILNRIMNGYTYLSDARVAEYEKHKSDLACLKHYIKEYGTQQQFDFLFRGTEKGSYSAYVHSVNSHEKQRRNMAGNKKEDLYSALKKMLKDMPENEEKTCIMMQIELDNFLPKQLTASNGVIPNQIHLKEMKKILANAENYLPFLKEKDESGYTVSERIQKLFAFQIPYYIGPTTEKSAEFGGNGWVVRKEEGKVLPWNIDQKIDMKKTSEKFISRMVRRCTYMNDEQVLPKESLEYESFCVLNELNNIKVYGEKLPVDIKQDIYRTLCEKGKRVTKKSLMQYLVGRGVIKAEDEEQLTGLMDGLNNTLKSFAKFKAIFGDAIYEDSCKKMVEQIIFWCTVYGDSKHFLKEQLLEKYGEVLTGAQIKRILGIKFRDWGNLSKKFLELQGCSKETGEVNSLIRMLWETNDNLMELLAQDSYTFKEELENMQESTYKVLTELQPEDLDHMYFSAPVKRMIWQTILIIKEVTKVMGCQPERLFIEMTREHGQKNDIKDSRAKKFYELYSKIKDEDKDWRKVIEDADKDGRIRSKKMYLYLTQMGRCMYTGRPIDLDQLFNNNLYDIDHIYPRHYVKDDNLENNMVLVEKQSNAHKSDVYPLESGIYEKQVNWWRELHRKNLINDEKLKRLTGRNPFTDEQKAGFIARQLVETSQGTKGVATILQEALPDTTLVYAKARNVSEFRSDNDLLKSRIVNDFHHAHDAYLNIVIGNVYYVKFTKNPINFIREHGTYNLGKMFAKDVKRGDDIGWVAQSGNGQTATMETIKRTMARNTPLLTRMSYEVTGGLANQTLYSASKAKEGTYIPLKSSDERMQDVTKYGGFTSVSTAYFMLVEHDGKKGKRIRTIESVPIMWKERIEKNPAELERYCLDVLKLSNPDIRVRKILIQSLIKRNGYYMQITGKTGNRMYVRNMVSLCLVQDWVNYIKKLEKDKDENISKEKNIRLYDVLMDKHINTIYNTRPNPVGDLLIKRRSDFIELKITDQVIILLEILKLTQTALGSANLKLIGEAEKTGVMLISKDITALDEMLLINQSVTGLYEQRVNLLTV

SEQ ID NO: 3192 - protein, 1299 aa, unidentified
  REGION 1..1299: note = Description of Unknown: uncultivated organism sequence
  REGION 1..1299: note = Category: MG91 effectors
  REGION 1..1299: note = Description: MG91-384 effector
MTAFKYYLGLDMGTNSVGWAATDPEYRLLKAKGKDLWGIREFNEASGAVERRTHRISRRRRQREQVRIGILKDYFHDAICEVDPSFFRRLENSKYHEEDKDVEVRYKNNIFNDGNYTDKDYFNEYPTIYHLRNELISSTEKHDVRLVFLALLNMFKHRGHFLNAGLGENNGESNIDNAYFELTELLSELTEYHLSQDIDCKQIEAILSRRDMSRTHKAEELAGVLHVDLKNKPYKELIRGLCGLKFNACVVFPDVQSEEVTKLDICLSESSFDEKSDEIANIIGEDYFEIIMAMKEMFDIGSLASIMKGHNYLSQARVASYTKHKEDLKLLKEVIKKYCGKKEYDKFFNSDADGSYASYVGSYNSKNKERRVGNKRTSEELYKEIKKLLKDAPKEDENVQKILTSIENETFLPKQLTASNGVIPNQVHAREMKKILSNAENYLPFLTEKDETGLSVSERILKLFTFQIPYYVGPTSENSGKNGGNGWVVRREDGQVLPWNIDEKIDMKATSEAFISRMVRRCTYISGEQVLPKASLEYQSYCVLNEINNIKIDGERISVELKQDIYKAVFQKGKKVTKKQLCKYLHTRGIIETEEQVTGVDVSINNALTTYGKFKPIFGEDISKDSVQKMIEDIVFWCTVYGDSKKFLKDRIEEKYGNKLSEEQIKRILGFKFKDWGNLSKKFLELNGADTSTGESISIIRALWNNNLNLMELINSSLYNYKECLAEYQNTMLKTLSEIEAEDLNEYYFSAPVRRMIWQTILVIKELVKVLGCEPERIFVEMTRRPDEHKTRTSSRRNKFEELYKKVKDEATDWMQVIAKAEEDGKIRSKKMYLYLTQKGRCMYTGKHIELDDLFDKNLYDIDHIYPRHFVKDDNIDNNLVLVCKEKNAHKSDHYPIEEEIFLSQKKMWLELRKSGFITEEKYNRLMGRSPFSDEQKAGFIARQLVETSQGTKGVANILRQLLPGSKIVYAKASNVSEFRHTRDDIPKSRLVNDFHHAHDAYLNIVVGNVYYVKFTQNPLNFIKKDYDKYKEDYNLSKMFDWDVKRNGEVAWIAQRKDGEAGTITTVKRMLSRNTPLMTRYSFEGKGGLANETLCSAKKAKGEGYIPFKSSDDKMQDVTKYGGFTSVTGAYFFLVEHTEKKKRIRTIESVPVYLAQKIEQNPDELKKYCEEILGLIDADIRLKKIKIGSLIKRNGYFCYITGKTGNRLIVRNAVNLCLKNEWIKYISKLEKVKEKDAVDKIITKEKNEVLYSELIQKFKHGIFSKRPNPVGDKLEKDSEKFNNLSIKDQCAVLCQVLRI

SEQ ID NO: 3193 - protein, 1352 aa, unidentified
  REGION 1..1352: note = Description of Unknown: uncultivated organism sequence
  REGION 1..1352: note = Category: MG91 effectors
  REGION 1..1352: note = Description: MG91-385 effector
MTAFKYYLGLDMGTNSVGWAATDPGYRLLKAKGKDLWGIREFNEASGAVERRTHRISRRRRQREQVRIGILKDYFHDAICEVDPGFFQRLENSKYHEEDKDVEVRYKNNIFNDSNYTDKDYFNEYPTIYHLRNELISSTEKHDVRLVFLALLNMFKHRGHFLNAGLGENNGESNIDNAYFELTELLSELTEYHLSQDIDCKQIEAILSRRDMSRTHKAEELAGVLHVDLKNKPYKELIRGLCGLKFNACVVFPDVQSEEVTKLDICLSESTFDEKSDEIANIIGEDYFEIIMAMKEMFDIGSLASIMKGHNYLSQARVASYTKHKEDLKLLKEVIKKYCSKKEYDKFFNSDADGSYASYVGSYNSKNKERRVGNKRTSEELYKEIKKLLKDAQKEDENVQKILTSIENETFLPKQLTASNGVIPNQVHAREMKKILSNAENYLPFLTEKDETGLSVSERILKLFTFQIPYYVGPTSENSGKNGGNGWVVRREDGQVLPWNIDEKIDMKATSEAFISRMVRRCTYISGEQVLPKASLEYQSYCVLNEINNIKIDGERISVELKQDIYKAVFQKGKKVTKKQLCKYLHTRGIIETEEQVTGVDVSINNALTTYGKFKPIFGEDISKDSVQKMIEDIVFWCTVYGDSKKFLKDRIEEKYGNKLSEEQIKRILGFKFKDWGNLSKKFLELNGADTSTGESISIISALWNNNLNLMELINSSLYNYKECLAEYQNTMLKTLSEIEAEDLNEYYFSAPVRRMIWQTILVIKELVKVLGCEPERIFVEMTRKPDEHKTRTSSRRNKFEELYKKVKDETTDWMQVIANAEEDGKIRSKKMYLYLTQKGRCMYTGKHIELDDLFDNNLYDIDHIYPRHFVKDDNIDNNLVLVCKEKNAHKSDHYPIEEEIFLSQKKMWLELRKSGFITEEKYNRLMDRNPFSDEQKAGFIARQLVETSQGTKGVANILRQLLPGSKIVYAKASNVSEFRCTRDDIQKSRLVNDFHHAHDAYLNIVVGNVYYVKFTQNPLNFIKKDYDKYKEDYNLSKMFDWDVKRNGEVAWIAQRKDGAAGTITTVKRMLSRNTPLMTRYSFDGKGGLTNETLYSAKKAKGEGYIPFKSSDDKMQDVTKYGGFTSVTGAYFFLVEHTEKKKRIRTIESVPVYLAQKIEQNPDELKKYCEEILGLIDADIRLKKIKIGSLIKRNGYFCYITGKTGNRLIVRNAVNLCLKNEWIKYISKLEKVKEKDAVDKIITKEKNEVLYSELIQKFKHGIFSKRPNPVGDKLEKDSEKFNNLSIKDQCAVLCQVLRMAAILGSECDMTLLGDSPNCGKMLISKKIGDEEIYLINQSVTGLYEKKINLHTV

SEQ ID NO: 3194 - protein, 1138 aa, unidentified
  REGION 1..1138: note = Description of Unknown: uncultivated organism sequence
  REGION 1..1138: note = Category: MG91 effectors
  REGION 1..1138: note = Description: MG91-386 effector
MVKYKIENLERKMSKKILSLDLGITSVGYSVLEELEKDKYSLIDYGVSMFDKPIDKDGKSKKLLHSSIKSTTKLYNLRKQRVKKLAHLFEKYNLGLATELLNQEKENRYPNKWRLRAKKVFEQKLTVGELFTILYLIAKHRGYKSLDSDDLLEELLLELGFEIEEKKSKKDDEKGKIKKALKTIEELIVKNPHKTVAQIIYEEEIIKDNPTFRNHDNYNYMIRRQHIKEEIEKIVVAQYEFGLFENDFEVKSFIKELIESIDDQKDSSNDLSLFGNCQYYPEFKVAHQYSLLSDIFKMYESVSNITLNKTKITKEQIEMVANWFFKKIEQGKNFSEIKYQDIRVVLKLSDEVKIFGKEDYYLDKKGKRVHHTITKFHFLSSLGKIDNGFIKVLFQKANSLEILDEIFDILKTEKSPKTIYSKLTDTFLRYDLIEDKKIRDETVINLIKNKSGKSLNISAYAMRKFIPYFKDGLSTDEIKEKLNLNRDENYANFKKWIKYLHIKNYEKDDNLEINNHPVKYVVSATIRVIKHLHSTYGVFDEIRVESTRELSQNEETKKAIEKANKENEKKFKEILENKEYQKIASDYGKNLKKYARKIILWEEQDKLDIYSGKVIDFDDIFSNRVDIDHIIPQSLGGLSVKHNLVLAHRDENVKKSNQLPMNFIKNKDDFVKRVEYLFSEHKINWKKRKNLLATTLDEAYQDTFESKSLRATSYIEALTAQMLKRYYPFPSKNKQRDGSAVRHIQGRATSNIRKLLGIKSKVRNTNIHHAIDAILIGLTNHSWLQKLSNTFRENIGVIDDEARAKIKKQIPIIEGIEPKELVELIESVYNIYGEESIFYKDIFGNTKSINFWVSKKPMSSKIHKDTIYAKKPNGIFTVREDIIKQFVGLKVTVKTEPKKFIESFEKKIANKIYVCKINPKDIICQIIKERAKEIELLLKSFVTLNHKDKEQISQAKEKLDTLIHKPLIDNNGNIIRKVKFYQTNLTGFDIRGGLAVTEKTFIGFKAIKGDKKIEYKRVDASNFQKIKKENDGSFKVYKNDIVFFIFSDATYKGGRVVSFLEDKKIVAFSNPRFAPNAKSQPISFVTIFKGEPYSHKQHSINKAIGIIKINLDILGNIKSYQKFGEVSKEIEAKILHME

SEQ ID NO: 3195 - protein, 623 aa, unidentified
  REGION 1..623: note = Description of Unknown: uncultivated organism sequence
  REGION 1..623: note = Category: MG91 effectors
  REGION 1..623: note = Description: MG91-387 effector
MYICSRLHSYTIVSETFVLTLPLKVEKWQADILDKRYELLRHTYNMVQQKLLRQYIYFSQQKAFKACKNFQQKREFFVSHPFHFRGINGKNGEPSDIKFPYTFESRSSNSGKRPSGGISDYVSKLWSHRIGQDKTLSNLGINSYILEELGLHIMKAWETRLYVPKSSRISFREFGDINSFGSRYKKGNFAGFTINLEEGFITYNTNGRKGEKANLVKLPIDFSREKKSYAVEALKGGKDSIRKLLIVRRQIRGRNKYYLQFTINGEKPQKGRTLGIGNVGIDIGPSTIATSSLQGVHFDKLADKCDNIEHELYLVNRKLDRSRRANNPQNYNADGTIKRGVRLVWKKDKEVKRYATLKMLRRELYRKQAEIRKQQHLEMANTMLSQGDTFIVENNPIDAWVRRAKDTTKTKTGRNRCKKRYGKSVANHAPAMFVSLLKNKVLSLGGHFYEVDTRYAATQFDFINGVRTKHEVSERSITLSNGRTHHRDMLSAFNLQHIKLESIGTEDRDYDIKQMEADYPIFCKLETTEQERFKEARRNERDALYFVGAAEKQLRRKPQEETVANRHNGGVGRKHCNTRLGSSIKENAKITGSGLVRESIERISQVPNEYHHAGSHPIILDGL

SEQ ID NO: 3196 - protein, 1352 aa, unidentified
  REGION 1..1352: note = Description of Unknown: uncultivated organism sequence
  REGION 1..1352: note = Category: MG91 effectors
  REGION 1..1352: note = Description: MG91-388 effector
MTAFKYYLGLDMGTNSVGWAATDPGYRLLKAKGKDLWGIREFNEASGAVERRTHRISRRRRQREQVRIGILKDYFHDAICEVDPSFFQRLENSKYHEEDKDVEVRYKNNIFNDSNYTDKDYFNEYPTIYHLRNELISSTEKHDVRLVFLALLNMFKHRGHFLNAGLGENNGESNIDNAYFELTELLSELTEYHLSQDIDCKQIEAILSRRDMSRTHKAEELAGVLHVDLKNKPYKELIRGLCGLKFNACVVFPDVQSEEVTKLDICLSESTFDEKSDEIANIIGEDYFEIIMAMKEMFDIGSLASIMKGHNYLSQARVASYTKHKEDLKLLKEVIKKYCGKKEYDKFFNSDADGSYASYVGSYNSKNKERRVGNKRTSEELYKEIKKLLKDAQKEDENVQKILTSIENETFLPKQLTASNGVIPNQVHAREMKKILSNAENYLPFLTEKDETGLSVSERILKLFTFQIPYYVGPTSENSGKNGGNGWVVRREDGQVLPWNIDEKIDMKATSEAFISRMVRRCTYISGEQVLPKASLEYQSYCVLNEINNIKIDGERISVELKQDIYKAVFQKGKKVTKKQLCKYLHTRGIIETEEQVTGVDVSINNALTTYGKFKPIFGEDISKDSVQKMIEDIVFWCTVYGDSKKFLKDRIEEKYGNKLSEEQIKRILGFKFKDWGNLSKKFLELNGADTSTGESISIIRALWNNNLNLMELINSSLYNYKECLAEYQNTMLKTLSEIEAEDLNEYYFSAPVRRMIWQTILVIKELVKVLGCEPERIFVEMTRRPDEHKTRTSSRRNKFEELYKKVKDEATDWMQVIAKAEEDGKIRSKKMYLYLTQKGRCMYTGKHIELDDLFDKNLYDIDHIYPRHFVKDDNIDNNLVLVCKEKNAHKSDHYPIEEEIFLSQKKMWLELRKSGFITEEKYNRLMGRSPFSDEQKAGFIARQLVETSQGTKGVANILRQLLPGSKIVYAKASNVSEFRHTRDDIPKSRLVNDFHHAHDAYLNIVVGNVYYVKFTQNPLNFIKKDYDKYKEDYNLSKMFDWDVKRNGEVAWIAQRKDGEAGTITTVKKMLSRNTPLMTRYSFEGKGGLANETLYSAKKAKGEGYIPFKSSDDKMQDVTKYGGFTKVTGAYFFLVEHTEKKKRIRTIESVPVSFVQKIEKNLGELKKYCEEILGLVDADIRLKKIKIGSLIKRNGYFCYITGKTGNRLSVRNAVNLCLKNEWIKYISKLEKVKEKDTIDEIITKEKNEVLYSELIQKFKHCIFSKRPNPVGDKLEKGSEKFSNLSIKDQCAVLCQVLRMAAILGSECDMTLLGESSICGEMKISKKIGDEEIYLINQSVTGLYEKKINLHTV

SEQ ID NO: 3197 - protein, 1293 aa, unidentified
  REGION 1..1293: note = Description of Unknown: uncultivated organism sequence
  REGION 1..1293: note = Category: MG91 effectors
  REGION 1..1293: note = Description: MG91-389 effector
MEKEYYLGLDMGTNSVGWAVTDDAYNLIRFKGKDMWGIREFDEANPAVERRTHRTSRRREQRNAVRMGLIRSYFADEIQKVDSNFYQRLDNSFFYVEDKQDNVKDKNGIFNDKNYKDANYYKQYPTIFHLRKELIEDASQKDVRLVYLAVANMFKHRGHFLLSGMGSESSKQTITDLYNQVSGLITEEYGISLKTDIAGTDFEQVLCSREYSRTRKSEKVCEILEIKNSDKLKKAFVKSMCGLSVKITDIIDDTFTEISDEDKKITFSFVDSDYDEKAGVLEEKLGTDVYDIISKLKEIHDKAQVAEIMKNYQYLSFARVADYEKHKKDLKILKRVVKKYFEPTVYDKLFRSEENGTYSAYVNSFNSEEKSRRNYKERKQEDLYNSIKKLLKSVDNVDDTDIEYIKNEMDKENFLPKQLTFKNGVIPNQIHASELKAILKNAEKYLPFLNEKDESGYTVSERILMLFSFQIPYYVGPVSSNSNGWVKRLEPGQVLPWNIDKKIDLKETSEQFIQRMVRNCTYIAGEKVLPKASLLYENFKVLNEINNLSINGERITVNLKQDLYNTLFLKGKRVTRKQIFNYFHSRGLVEEDSQISGIDIAVNNSLSTYGKFLPLFGEHLKEDKYKKMVDDIVFWCTVYGDSRKFLREQLEEKYSDVLDENQIKRITGMKFKDWGNLSKEFLELSGCCKSTGEVMPLIRAMWETNYNLMELLHSEEFTYSEELEEKQGKIEKVLSEYTIDDLNEEYFSAPVKRMVWQTLLIIKEIEKIMKCPPTRIFVEMTRKDDEKGDNGRKSSRKDQLLALYKKIQSEDKEWKKEMSSRIEDYDKNGALRSKKLYLYFIQKGLDMYTGKPIDLDNLMSANSNYDIDHIYPRHFVKDDNINNNLVLASKPANAEKSDIYPIKDSIYQKMKYTWKVLRDEGLITEEKYKRLTGRNPFTDEQKAGFIARQLVETGQGTKGVADLLTALLPDTKLVYSKAGNVSDFRKRYDIPKSRLINDFHHAHDAYLNIVVGNIYFTKFTSNPLNYIRKECSSKDNKYQYNLGNMYKWDVKRDGKTAWVAPEEGETGTLATVKKMLSRNTPILTRLTIEGHGGIADATLYSHKKAKQDTYIPLKSSDARMADVTKYGGYSSVTTAYLFLVEHEIKGKKIRTLETVPLYLKDRLENSKEKLEEYCRETLGYTNPSVRMKKIKLQSLIKLNGYYMQISGKTNKQFTVRNYVQFCLNSKWVDYIHKLEKYQDKGVIDDAITDEKNVELYNVLCEKHSVGIFTLRPNPVGDKIKKGYEKVLSVLYSH

SEQ ID NO: 3198 - protein, 1357 aa, unidentified
  REGION 1..1357: note = Description of Unknown: uncultivated organism sequence
  REGION 1..1357: note = Category: MG91 effectors
  REGION 1..1357: note = Description: MG91-390 effector
MQGYYLGLDMGTNSVGWAVTDYEYRLLRFKGKDMWGIREFDEAKPAVERRRHRTNRRRQQRKMVRLGLIKSYFADEISKIDPLFFNRLDNSKYFLEDKDEQVRCKNAIFNDINYTDKDYYAQYPTVFHLRKELIENKEPHDVRLVYLAISNMFKHRGNFLISGLGIDRDDETIGEAYLKVADMLSEEFDVEFDKKIDLSFFEKTLSSREYSRTKKSELICDILQVKNSEKQKKAFVKCLCGLNVKISDIIGENGIELSDEDKKTAFSFNDNDYDVKIIEIEQKIGENKTTVIAKLKEIHDKALLSEIMKGKPYLSYARVADYEKHAYDLKILKRVIKKYFSNQEYDNLFRSEENGTYSAYVNSYNSGNKSRRNYKERKQEDLYKNIKSLMKSLGDNDDIDVQYIKDEIDRENFLPKQLTFKNGVIPNQVHANELKAILNNAQEYLTFLNEKDESGYTVSERIQQLFSFQIPYYVGPVSSDSNGWVVRKEEGPVLPWNIKEKIDLKKTSEEFIGRMVRNCTYISGERVLPKASLLYEKYRVLNEINNLRIDGERISVELKQDIFNTLFLKGKRVTRKQIFNYLHSRGMAQEDAQISGIDVTVNNSLSTYGKFLPIFGEHLKEDSYKKMAENIVFWCTVYGDSKKFLKEQLEEKYADKLDEAQIKRILGMKFNDWGNLSKEFFELSGCNKSTGEVMPLINALWENNLNMIELLNSDEFTYKESLAEKQNVAIKSLSEYTIDDLNEEYFSAPVKRMIWQTLMIIKEIEKIMKASPDRVFIEMTRKDGEKGDKGRKNSRKDKLIALYKQIRSEDSAWKKEMSSRIEKYDENGSLRSKKLYLYFTQKGLDMYTGKPIDIDDLMSANSKYDIDHIYPRHFVKDDNINNNLVLASKTANSEKSDIYPIKDTIYQKMKSTWKLLKDENLITEEKYRRLVGREPFTDEQKAGFIARQLVETSQGTKGVADLLNMLLPDSKIVYSKADNVSEFRHKYEIPKSRLINDYHHANDAYLNIVVGNVYYTKFTQNPINFIKKEYSSGDRKFEYNLSKMFEWDVVRGDKVAWVAEKDRKHGTIVTVKKMINKNTPILTRMPVEGHGGLADATLYSHKKAKSDTYIPLKATDAKLQDVTKYGGFSSVATAYIFLVEHELKGKKVRTLETVPLYMKAELESSVERLEQYCRDTLGLINPSVRIKKIKLQSLIKLNGYYMQISGKTDKQFGMRNCVQLCLKKEWIEYVHKLEKFQSYGVIDDIISEQNNIKLYDELCEKHRNGIYNKKPNYMGDKLLNGKNEFVKLNKNEQIKVLIQIIKLTVVGLVEGDLTLIKESSKSGTLKISKNITNAKEFELINQSITGLYENRIDLLRV

SEQ ID NO: 3199 - protein, 1343 aa, unidentified
  REGION 1..1343: note = Description of Unknown: uncultivated organism sequence
  REGION 1..1343: note = Category: MG91 effectors
  REGION 1..1343: note = Description: MG91-391 effector
MEYYMGLDMGTSSVGWAVTDEKYNLIKKHGKDMWGIREFEEADTAEARRTFRVARRRRQREVVRIGLLKEYFHDEVIKVDPNFFQRLENSKYFQEDKDEEVNEKYGIFADKNYTDKDYFKKYPTIYHLRKELLHSQEPHDVRLIYLALLNMYKHRGHFLNASLGIDGENRKMKDIYCDFVLMARDVLELEFPTEFGEVQFQNLMCARDLSRKKKAEKLIDLLGIDKKQKQHIALLECILGLDKSVKTLYGKKLADDFDKSIKINFSDSGFDEKAEELADILGEERFDLILCMKELYDSATLNQIMGTHKYLSEARVQEYEKHKNDLKKLKCVIKKYGTREQYAFLFRSVEKATYSAYVRSVNSGGKERRNMSERTKDALYATLKKILKEFPADDKDCIYIMEEIEKNHFLPKQMTSANGVIPNQIHAKEMKQILKNAEKYLSFLSEKDESGLSVSERILQLFTFQIPYYIGPLSTNSAKNNGNGWVIRKEEGKVFPWNMDQKIDKKKTSEEFISRMVRRCTYMGGEQVLPKSSLEYECFSVLNELNNLKVRNEKLPVEIKQKIYTDLFTRGKKVSKKSIANYLKGCGILQEGAEDELTGMMDSINSSLSSYGKFRAIFGDQMKEDSCKKMIEKIIFWCTVYGNSKQFLKEQMEENYGSILTQNQIKRILGFKLKDWGNLSKEFLELQGSRKDTGEKMSLIRMLWETNDNLMELLDNSQYTYKKELEKRQENLEKTLKEIQPEDLEGYYFSAPVKRMIWQTLLVLKETEKVMGQPPKRLFVEMTREHGEKNDIKDSRAKKFLDLYKNIREEDHDWKNVIENAEESGTIRSKKMYLYLTQRGRCMYTGNIIDLSQLFDNNLYDIDHIYPRHFVKDDNLENNMVLVEKQKNAHKSDKYPLEESIYNKQISFWRELHHQKLINDEKFKRLTDRNPFSDEQKAGFIARQLVETSQGTKGITKILKEVLPDTTMVYAKAKNVSDFRNQYKILKSRVVNEFHHAHDAYLNIVVGNVYYTKFTNNPINFIKKQEPYNLSRVFEWNVVRNGEEAWIAKPEKEQKITIETVRKMLARNTPLLTRLSFEGTGGLANQTLYGAEKAQGDGYIPLKSSDLKLRNVRKYGGFSSVSTAYFILVEHEQKKKRVRTLETVPILWKDRIEKDPKQLEVYCTEVLGLINSDIRIRKIRIQSLVKKDGYYMYLSGKTGNQIIMRNAVQLCLRQEWINYIKKLEKETIDEVITKEENSELYNLLCEKHLEGIYAKRPNPVGEKLRKRICEFNQLEITEQRQLLLELLNLSKIGVVKANLTLIGETSSAGTMKVSKNISESKEFKLIHQSITGLYEKQVDLLNV

SEQ ID NO: 3200 - protein, 1347 aa, unidentified
  REGION 1..1347: note = Description of Unknown: uncultivated organism sequence
  REGION 1..1347: note = Category: MG91 effectors
  REGION 1..1347: note = Description: MG91-392 effector
MEEKEYYLGLDMGTNSVGWAVTDPQYIILRAKGKDMWGIREFESAETAETRRVHRTSRRRRQREVVRMGLVKDYFSDAINNVDGNFYARLENSKYHLEDKDETVRNKNGIFADEHYTDKEYYAEYPTIYHLIMELINNPAPHDVRLVYLAVANLFKRRGHFLNAGLSEDGGNQSMQTAYDEFNTTCNETLEFSFPGIDATQIEEVLKNRNYSKTVKSEKLAELLGVEKKEKQRIEILRAIAGRKVNAKVIFPNVETEDKVEFSFSDAAFDDNATELMTLLGDECYSLVLCMREMYDIGTLAEIMHGYQYLSESRMADYQKHHEDLVLLKSVIKSECTQKQYDELFRLDGEGSYSAYVNSILAKNHKQRRSMKGRTRDDFYKKVREFIGKSSNPDAIKICTEIENETFMPKMLTSANGIIPNQVHYKELKAILSNAEKYLPFLLEKDESGLTTSDRIQRLYKFRIPYYVGPVSNRDGKGNGWAVRKEEGMVLPWNLEEKIDLSKTKEAFIENLIRRCTYISDEKVLPKNSLIYEKFTVLNEINNIRINDERISVELKQDIYNDLFKKGKKVTRKTLAKYLINRGAIKAENQISGIDIAINNSLSSYGKFKAVFGESMDTDSTKKMVEDIIKTSTIYGDDKRELKNILRDKYGEILSEDQIKRIAGFRCKDWGRLSRAFLELAGTNCGTGEVTSIIQALWESQLNLMELLHSEDYTFGESLNEKLVKNEKSLSEITAEDLDDYYFSAPVKRMAWQTILLIKEISKIKGCEPSKIFIEMTRTDEEKGDKGRKNSRAKELTALYKNIKKEGKAWIELISKEDASGRLKSKKMYLYIKQMGRDMYTGEQIDLDRLFDDNLYDIDHIYPRHFVKDNNIENNLVLVNKAKNSRKSDNYPLDSDIVRNPKVRELWEMLHTNHLMSDEKYHRLTSRKAFTDEDMAGFIARQLVETGQATKGVADLLKDLTNSEIIYSKAGNVSDFRHTYDIPKSRIVNEFHHAHDAYLNIVVGNAYYTKFTSNPLNYIRKEYKKNTKENNYHLNKIFASTISRNGYVAWFAGSDKNPGTIQTVKKMLSRNTPLMTRMTFVVHGSIAEETLYGKNTAKEDSYLPLKGSDPRMSVEKYGGFKKASGAYFFLVEHELKGKKVRTIETVPVYLMKKLSDKRELQKYCEEKLGLINPSIRLKQIKMQSLIKLNGYFVNVTGRTNKQLTLRNAVNLKLDKEDIYIIHLVEKCIGEERDDRLSEESILSLYQTLTEKQVSGIYRNRPNSVYEKLNEGMIRFKKLERKQQIKVLANMLNLTMVGKAQADLKDIGGSANSGVMLMAKKINNYNEVKLINQSVTGLYQTEVDLLTV

SEQ ID NO: 3201 - protein, 1352 aa, unidentified
  REGION 1..1352: note = Description of Unknown: uncultivated organism sequence
  REGION 1..1352: note = Category: MG91 effectors
  REGION 1..1352: note = Description: MG91-393 effector
MTAFKYYLGLDMGTNSVGWAATDPEYRLLKAKGKDLWGIREFNEASGAVERRTHRISRRRRQREQVRIGILKDYFHDAICEVDPSFFRRLENSKYHEEDKDVEVRYKNNIFNDGNYTDKDYFNEYPTIYHLRNELISSTEKHDVRLVFLALLNMFKHRGHFLNAGLGENNGESNIDNAYFELTELLSELTEYHLSQDIDCKQIEAILSRRDMSRTHKAEELAGVLHVDLKNKPYKELIRGLCGLKFNACVVFPDVQSEEVTKLDICLSESSFDEKSDEIANIIGEDYFEIIMAMKEMFDIGSLASIMKGHNYLSQARVASYTKHKEDLKLLKEVIKKYCGKKEYDKFFNSDADGSYASYVGSYNSKNKERRVGNKRTSEELYKEIKKLLKDAPKEDENVQKILTSIENETFLPKQLTASNGVIPNQVHAREMKKILSNAENYLPFLTEKDETGLSVSERILKLFTFQIPYYVGPTSENSGKNGGNGWVVRREDGQVLPWNIDEKIDMKATSEAFISRMVRRCTYISGEQVLPKASLEYQSYCVLNEINNIKIDGERISVELKQDIYKAVFQKGKKVTKKQLCKYLHTRGIIETEEQVTGVDVSINNALTTYGKFKPIFGEDISKDSVQKMIEDIVFWCTVYGDSKKFLKDRIEEKYGNKLSEEQIKRILGFKFKDWGNLSKKFLELNGADTSTGESISIIRALWNNNLNLMELINSSLYNYKECLAEYQNTMLKTLSEIEAEDLNEYYFSAPVRRIIWQTILVIKELVKVLGCEPERIFVEMTRKPDEHKTRTSSRRNKFEELYKKVKDEATDWMQVIAKAEEDGKIRSKKMYLYLTQKGRCMYTGKHIELDDLFDKNLYDIDHIYPRHFVKDDNIDNNLVLVCKEKNAHKSDHYPIEEEIFLSQKKMWLELRKSEFITEEKYNRLMGRSPFSDEQKAGFIARQLVETSQGTKGVANILRQLLPGSKIVYAKASNVSEFRHTRDDIPKSRLVNDFHHAHDAYLNIVVGNVYYVKFTQNPLNFIKKDYDKYKEDYNLSKMFDWDVKRNGEVAWIAQRKDGEAGTITTVKRMLSRNTPLMTRYSFEGKGGLANETLCSAKKAKGEGYIPFKSSDDKMQDVTKYGGFTKVTGAYFFLVEHTEKKKRIRTIESVPVYLAQKIEQNPDELKKYCEEILGLVDADIRLKKIKIGSLIKRNGYFCYITGKTGNRLSVRNAVNLCLKNEWIKYISKLEKVKEKDAVDEIITKEKNEVLYSELIQKFKHGIFSKRPNPVEDKLEKGSEKFSNLSIKEQCAVLCQILQLAAVLGSECDMTLLGESAHCGKMLISKKIGDEEIYLLNQSVTGLYEKKINLHTV

SEQ ID NO: 3202 - protein, 1358 aa, unidentified
  REGION 1..1358: note = Description of Unknown: uncultivated organism sequence
  REGION 1..1358: note = Category: MG91 effectors
  REGION 1..1358: note = Description: MG91-394 effector
MEKEYYLGLDMGTNSVGWAVTDDAYNLIRFKGKDMWGIREFDEANPAVERRTHRTSRRREQRNAVRMGLIRSYFADEIQKVDSNFYQRLDNSFFHVEDKQDNVKDKNGIFNDKNYKDADYYKQYPTIFHLRKELIEDASQKDVRLVYLAVANMFKHRGHFLLSGIGSESSKQTITDLYNQVSGLITEEYGISLKTDIAGTDFEQVLCSREYSRTRKSEKVCEILEIKNSDKLKKAFVKSMCGLSVKITDVIDDTFTEISDEDKKITFSFVDSDYDEKAGVLEEKLGTDVYDIISKLKEIHDKAQVAEIMKNYQYLSFARVADYEKHKKDLKILKRVVKKYFEPTVYDKLFRSGENGTYSAYVNSFNSGEKSRRNYKERKQEDLYNSIKKLIKSIDNVCDTDIEYIKNEIEKENFLPKQLTFKNGVIPNQIHASELKAILKNAEKYLPFLNEKDESGYTVSERILMLFSFQIPYYVGPVSSNSNGWVKRLEPGQVLPWNIDKKIDLKETSEQFIQRMVRNCTYIAGEKVLPKASLLYENFKVLNEINNLSINGERIAVALKQDLYNTLFLKGKRVTRKQIFNYFHSRGLVEEDSQISGIDIAVNNSLSTYGKFLPLFGEHLKEDKYKKMVDDIVFWCTVYGDSRKFLREQLEEKYSDVLDENQIKRITGMKFKDWGNLSKEFLELSGCCKSTGEMIPLIRAMWETNYNLMELLHSEEFTYSEELEEKQGKIEKVLSEYTIDDLNEEYFSAPVKRMVWQTLLIIKEIEKIMKCPPTRIFVEMTRKDDEKGDNGRKSSRKDQLLALYKKIQSEDKEWKKEMSSRIEDYDKNGALRSKKLYLYFIQKGLDMYTGKPIDLDNLMSANSNYDIDHIYPRHFVKDDNINNNLVLASKPANAEKSDIYPIKDSIYQKMKYTWKVLRDEGLITEEKYKRLTGRNPFTDEQKAGFIARQLVETGQGTKGVADLLTALLPDTKLVYSKAGNVSDFRKRYDIPKSRLINDFHHAHDAYLNIVVGNIYFTKFTSNPLNYIRKECSSKDNKYQYNLGNMYKWDVKRDGKTAWIAAKEGETGTIATVKKILSRNTPTLTRLTIEGHGGIADATLYSHKKAKQDAYIPLKSSDARMADVTKYGGYSSVTTAYLFLVEHEIKGKKIRTLETVPLYLKDRLENSKEKLEEYCRESLGYTNPSVRMKKIKLQSLIKLNGYYMQISGKSIKQFEVRNYVQICLNGKWVDYIHKLEKYQDKGVIDNAITDEKNVELYNILCEKHSVGIFTLRPNPVGDKIKKGYDKFVNLTTEEQIKLLIEIIKLTCVGIVKADLRLIGASEKSGTMKINKNITDAKECFLINQSVTGLYENRIDLLRV

SEQ ID NO: 3203 - protein, 1215 aa, unidentified
  REGION 1..1215: note = Description of Unknown: uncultivated organism sequence
  REGION 1..1215: note = Category: MG91 effectors
  REGION 1..1215: note = Description: MG91-395 effector
MYNRYYLGLDMGTSTVGWAVTDPDYKLIRKSGKDMWGIREFEEGKTAAERRVNRIARRRRQRETARIGLLKEYFHDAIVAVDPLFYQRLDNSRYWPEDKDAVLSSKNSLFHDKDYTDADYYREYPTIFHLRMELIKNPKPHDVRLVYLALLNMFKHRGHFLLNGNLSEDSGSDMGTLCRACLERFEEIDISLVGVSGDEIENVLSLRDLSRSGKAEKLMDLLNISNKQKKEVLWVKAICGLKVDVTKLFNSINTEEKLDLCFADAGFEEKVPEITEAIGEENAQILFLMKAIFDRGILARLLKGSNYLSEARIKDYEKHKSDLSLLKHLVRKYCTEDVYDKMFRAPEAGSYSAYVNSTLTGDEKKRRNMGGRSREDFYKTVKNCFKDIKTPDDDLQRVLRDIDNEDFMPKQLTASNGVIPNQLHQKEMERILDNARKYLPFLNQKDERGLCVYERILRLFTFQIPYYIGPVTENSSKNGGTGWVVRKEKGQVLPWNFQDKIDIPATSEQFIQRMVRNCTYMSGEKVLPKSSLLYESYCVLNEINNIRINGEKITVELKQDLYNDLFKKGRKVTKKQLVKYLINQGVMKEEAELSGIDVTVNNSLGSYGKFAAVFGPEIETDSGKTMIENIIYWGTVFGQDKNLWKQKIQQNYPEITRTVLKRILGYRFSDWGRMSRTFLEMEGCDKNTGEIRSLIRSMWETNHNLMELLDRNLFTYREDLEKQQKKQFSSLSEITPEVLDDYYFSAPVKKMIWQTFGVIREVEKVMGCPPEKIFVEMTRTDEEKGDKGRKDSRKKVLLEKFRGIKEASRDWRDFIEKEDQSGRLRSKKMFLYISQLGKDMYSGEAIDLDRLFDDNLYDIDHIYPRHFVKDDSIHNNLVLVKKQTNAHKSDTYPLENSIRSNPAVTSLWHLLREKGLITEEKYRRLTGRNPFSEEQQADFIARQMVETGQATKGVSELLKEAVPEASIVYSKAGNVSDFRRTYDLLKSRSVNDFHHAHDAYLNIVVGNAYYVKFTQNPLNYIRKEYRNGTKNGEYNLSKMFERNIVRNGETAWIASEKKDPGTIATVKAMLKRNTPILTRQSFIAHGALTDATVYGKDIAKAKVYLPTKTSDQRLQDVTKYGGLNKAAVAYFSLVEHTVKGKKVRTLEAIPVYLKEKVEMHPEELNIYLTDYLGLKDVSVRMRVVRIQSLIKVDGYYAYISGNNDNRIMLRYAIKL

SEQ ID NO: 3204 - protein, 1358 aa, unidentified
  REGION 1..1358: note = Description of Unknown: uncultivated organism sequence
  REGION 1..1358: note = Category: MG91 effectors
  REGION 1..1358: note = Description: MG91-396 effector
MEKEYYLGLDMGTNSVGWAVTDDAYNLIRFKGKDMWGIREFDEANPAVERRTHRTSRRREQRNAVRMGLIRSYFADEIQKVDSNFYQRLDNSFFHVEDKQDNVKDKNGIFNDKNYKDADYYKQYPTIFHLRKELIEDASQKDVRLVYLAVANMFKHRGHFLLSGIGSESSKQTITDLYNQVSGLITEEYGISLKTDIAGTDFEQVLCSREYSRTRKSEKVCEILEIKNSDKLKKAFVKSMCGLSVKITDVIDDTFTEISDEDKKITFSFVDSDYDEKAGVLEEKLGTDVYDIISKLKEIHDKAQVAEIMKNYQYLSFARVADYEKHKKDLKILKRVVKKYFEPTVYDKLFRSGENGTYSAYVNSFNSGEKSRRNYKERKQEDLYNSIKKLIKSIDNVCDTDIEYIKNEIEKENFLPKQLTFKNGVIPNQIHASELKAILKNAEKYLPFLNEKDESGYTVSERILMLFSFQIPYYVGPVSPNSNGWVKRLEPGQVLPWNIDKKIDLKETSEQFIQRMVRNCTYIAGEKVLPKASLLYENFKVLNEINNLSINGERIAVALKQDLYNTLFLKGKRVTRKQIFNYFHSRGLVEEDSQISGIDIAVNNSLSTYGKFLPLFGEHLKEDKYKKMVDDIVFWCTVYGDSRKFLREQLEEKYSDVLDENQIKRITGMKFKDWGNLSKEFLELSGCCKSTGEMIPLIRAMWETNYNLMELLHSEEFTYSEELEEKQGKIEKVLSEYTIDDLNEEYFSAPVKRMVWQTLLIIKEIEKIMKCPPTRIFVEMTRKDDEKGDNGRKSSRKDQLLALYKKIQSEDKEWKKEMSSRIEDYDKNGALRSKKLYLYFIQKGLDMYTGKPIDLDNLMSANSNYDIDHIYPRHFVKDDNINNNLVLASKPANAEKSDIYPIKDSIYQKMKYTWKVLRDEGLITEEKYKRLTGRNPFTDEQKAGFIARQLVETGQGTKGVADLLTALLPDTKLVYSKAGNVSDFRKRYDIPKSRLINDFHHAHDAYLNIVVGNIYFTKFTSNPLNYIRKECSSKDNKYQYNLGNMYKWDVKRDGKTAWIAAKEGETGTIATVKKILSRNTPTLTRLTIEGHGGIADATLYSHKKAKQDAYIPLKSSDARMADVTKYGGYSSVTTAYLFLVEHEIKGKKIRTLETVPLYLKDRLENSKEKLEEYCRETLGYTNPSVRMKKIKLQSLIKLNGYYMQISGKTNKQFTVRNYVQFCLNSKWVDYIHKLEKYQDKGVIDDAITDEKNVELYNVLCEKHSVGIFTLRPNPVGDKIKKGYDKFVNLTTEEQIKLLIEIIKLTCVGIVSANLTLIGGAAISGKMLISKNITDAKECLLINQSVTGLYENRIDLLRV

SEQ ID NO: 3205 - protein, 1107 aa, unidentified
  REGION 1..1107: note = Description of Unknown: uncultivated organism sequence
  REGION 1..1107: note = Category: MG91 effectors
  REGION 1..1107: note = Description: MG91-397 effector
MNILSLDLGITSIGYSILEKKENNRYSLIDYGVSMFDAPFDKDGKSKKLLHSTNTSMSNLYAKRKQRKKALANLFEKFGLAKAQKLLQQEKQNIYKNKWQLRCKDVFERKLNIGEFFTILYFIAKHRGYKSLDTNELLEELCEELKLDCGLKSSQKDDEKGKIKQALKRVEELKQNTNKTVAQIIYEIESKKQTPTFRNHDNYNYMIRREYIEDELKKLVESQVKFGLFGNTFDKEKFINELKEIIVKQKESSNDLNLFANCEYYKEHKVANQYSVVADIFKMYESVINIKLNKEKITKEQIQLIADDFFTKIKKGKNIPDIKYKDIRKILKLSDDIKIFDKKDSYVRKGKTIHHTITKFHFLNNLSKFDNSFIVENLKNLENLAEIFEVLNKEKSPKTIFEQLKGKVDEKTIIELIKYKNGKSLNISHYAMLKFIPYFQEGLTTDEIKKKLDLNRNEDYSKYKKGIKYLHVNQFEKDDNLEINNHPVKYIVSAVMRVVKHLHTLYGPFDEIKVESTRELSLPKKVKDKIDKVNKDNEAKYLAVLKNEAYLSAAKYHNKNIQKYKEQLVLYEEQEGRDIYTWQGIEIDDIFKDKLEVDHIVPQSLGGLSVKHNKVLCFKNSNATKGNRLPMNYIKDTESFRKNIEYLYTKKVINGKKLKNLLATNLDEIYKDTFESKSLRATSYVEALTAQMLKRYYPFADKQKQKDGNAVMYIQGRATANIRKLLHVKAKTRGTNIHHAIDALIIGVTSHSWLKKISNTFRENYGVIDDKARENIKKELPLIEGVSVAELVAHIEENYNFDGEESVFYRDIFGNVKVVPFWVSKKSMVSKIHKDTIYAKKPDGIFTVREKILDKFIALKITPTTSPDEFMKKFQKEILEKMYLYKTNPKDKICQIIQQRAFDIAQLLDNLQLEDTTDKEMLSETKKYLDEFIHQDLKDHNSNVIRKVQFYQTNLTGFEIRGGLATKEKTFIGFSATLNGDKIEYKRIDVANFETIKKDAGFKVYKNDIVFFIYPDGSFKGGKIVSFLEEKNVASFSNLRYPANINLQPHSFVTLFKGKANSHKQHSINKAIGIIKLHLDIIGNIKSFSSLGEVDSELLSFLKKLKD

SEQ ID NO: 3206 - protein, 1358 aa, unidentified
  REGION 1..1358: note = Description of Unknown: uncultivated organism sequence
  REGION 1..1358: note = Category: MG91 effectors
  REGION 1..1358: note = Description: MG91-398 effector
MEKEYYLGLDMGTNSVGWAVTDDAYNLIRFKGKDMWGIREFDEANPAVERRTHRTSRRREQRNAVRMGLIRSYFADEIQKVDSNFYQRLDNSFFHVEDKQDNVKDKNGIFNDKNYKDADYYKQYPTIFHLRKELIEDASQKDVRLVYLAVANMFKHRGHFLLSGIGSESSKQTITDLYNQVSGLITEEYGISLKTDIAGTDFEQVLCSREYSRTRKSEKVCEILEIKNSDKLKKAFVKSMCGLSVKITDIIDDTFTEISDEDKKITFSFVDSDYDEKAGVLEEKLGTDVYDIISKLKEIHDKAQVAEIMKNYQYLSFARVADYEKHKKDLKILKRVVKKYFEPTVYDKLFRSEENGTYSAYVNSFNSEEKSRRNYKERKQEDLYNSIKKLLKSVDNVDDTDIEYIKNEMDKENFLPKQLTFKNGVIPNQIHASELKAILKNAEKYLPFLNEKDESGYTVSERISMLFSFQIPYYVGPVSSNSNGWVKRLEPGQVLPWNIDKKIDLKETSEQFIQRMVRNCTYIAGEKVLPKASLLYENFKVLNEINNLSINGERITVNLKQDLYNTLFLKGKRVTRKQIFNYFHSRGLVEEDSQISGIDIAVNNSLSTYGKFLPLFGEHLKEDKYKKMVDDIVFWCTVYGDSRKFLREQLEEKYSDVLDENQIKRITGMKFKDWGNLSKEFLELSGCCKSTGEMIPLIRAMWETNYNLMELLHSEEFTYSEELEEKQGKIEKVLSEYTIDDLNEEYFSAPVKRMVWQTLLIIKEIEKIMKCHPTRIFIEMTRKDDEKGDNGRKSSRKDQLLALYKKIQSEDKEWKKEMSSRIEDYDKNGALRSKKLYLYFIQKGLDMYTGKPIDLDNLMSANSNYDIDHIYPRHFVKDDNINNNLVLASKPANAEKSDIYPIKDSIYQKMKYTWKVLRDEGLITEEKYKRLTGRNPFTDEQKAGFIARQLVETGQGTKGVADLLTALLPDTKLVYSKAGNVSDFRKRYDIPKSRLINDFHHAHDAYLNIVVGNIYFTKFTSNPLNYIRKECSSKDNKYQYNLGNMYKWDVKRDGKTAWIAAKEGETGTIATVKKMLSRNTPTLTRLTIEGHGGIADATLYSHKKAKQDAYIPLKSSDARMADVTKYGGYSSVTTAYLFLVEHEIKGKKIRTLETVPLYLKDRLENSKEKLEEYCRETLGYTNPSVRMKKIKLQSLIKLNGYYMQISGKTNKQFTVRNYVQFCLNSKWVDYIHKLEKYQDKGVIDDAITDEKNVELYNVLCEKHSVGIFTLRPNPVGDKIKNGYDKFVNLTTEEQIKLLIEIIKLTCVGIVSANLTLIGGASISGKMLISKNITDAKECLLINQSVTGLYENRIDLLRV

SEQ ID NO: 3207 - protein, 1358 aa, unidentified
  REGION 1..1358: note = Description of Unknown: uncultivated organism sequence
  REGION 1..1358: note = Category: MG91 effectors
  REGION 1..1358: note = Description: MG91-399 effector
MEKEYYLGLDMGTNSVGWAVTDDAYNLIRFKGKDMWGIREFDEANPAVERRTHRTSRRREQRNAVRMGLIRSYFADEIQKVDSNFYQRLDNSFFHVEDKQDNVKDKNGIFNDKNYKDADYYKQYPTIFHLRKELIEDASQKDVRLVYLAVANMFKHRGHFLLSGIGSESSKQTITDLYNQVSGLITEEYGISLKTDIAGTDFEQVLCSREYSRTRKSEKVCEILEIKNSDKLKKAFVKSMCGLSVKITDVIDDTFTEISDEDKKITFSFVDSDYDEKAGVLEEKLGTDVYDIISKLKEIHDKAQVAEIMKNYQYLSFARVADYEKHKKDLKILKRVVKKYFEPTVYDKLFRSGENGTYSAYVNSFNSGEKSRRNYKERKQEDLYNSIKKLLKSIDNVCDTDIEYIKNEIEKENFLPKQLTFKNGVIPNQIHASELKAILKNAEKYLPFLNEKDESGYTVSERILMLFSFQIPYYVGPVSSNSNGWVKRLEPGQVLPWNIDKKIDLKETSEQFIQRMVRNCTYIAGEKVLPKASLLYENFKVLNEINNLSINGERIAVALKQDLYNTLFLKGKRVTRKQIFNYFHSRGLVEEDSQISGIDIAVNNSLSTYGKFLPLFGEHLKEDKYKKMVDDIVFWCTVYGDSRKFLREQLEEKYSDVLDENQIKRITGMKFKDWGNLSKEFLELLGCCKSTGEMIPLIRAMWETNYNLMELLHSEEFTYSEELEEKQGKIEKVLSEYTIDDLNEEYFSAPVKRMVWQTLLIIKEIEKIMKCPPTRIFVEMTRKDDEKGDNGRKSSRKDQLLALYKKIQSEDKEWKKEMSSRIEDYDKNGALRSKKLYLYFIQKGLDMYTGKPIDLDNLMSANSNYDIDHIYPRHFVKDDNINNNLVLASKTANAEKSDIYPIKDSIYQKMKYTWKVLRDEGLITEEKYKRLTGRNPFTDEQKAGFIARQLVETGQGTKGVADLLTALLPDTKLVYSKAGNVSDFRKRYDIPKSRLINDFHHAHDAYLNIVVGNIYFTKFTSNPLNYIRKECSSKDNKYQYNLGNMYKWDVKRDGKTAWIAAKEGETGTIATVKKMLSRNTPTLTRLTIEGHGGIADATLYSHKKAKQDAYIPLKSSDARMADVTKYGGYSSVTTAYLFLVEHEIKGKKIRTLETVPLYLKDRLENSKEKLEEYCRETLGYTNPSVRMKKIKLQSLIKLNGYYMQISGKTNKQFTVRNYVQFCLNSKWVDYIHKLEKYQDKGVIDDAITDEKNVELYNVLCEKHSVGIFTLRPNPVGDKIKKGYDKFVNLTTEEQIKLLIEIIKLTCVGIVSANLTLIGGASISGKMLISKNITDAKECLLINQSVTGLYENRIDLLRV

SEQ ID NO: 3208 - protein, 603 aa, unidentified
  REGION 1..603: note = Description of Unknown: uncultivated organism sequence
  REGION 1..603: note = Category: MG91 effectors
  REGION 1..603: note = Description: MG91-400 effector
MAKENFVLTLPLRVDKCQADILDKRYELLRLIYNMVQQKLVRQYIYFSQQKAFKACESFEQKREFFNTHPFHFKGIKGKNGELCDIKFPYTYESRSSSSGKRPSGGISDYVSKLWSHKVGADKRLVDFGLNGSIMEELGLHVMKAWEDRLYKYKTKRVSFKGYGAINSLGCRYHKGNFAGFTINLEEGFITFNTNGRHGQFADIITLPIDFSREKKGYAAEAFKSGVDSLRKLIIVRRCIRGRNKYYLQLTISGEKPQKGRTLGKGNVGIDIGPSTIATSSLQGVHFDKLADKCDNIEHELYLINRKLDRSRRVNNPENYNPDGTIKRGVRLVWKKDKDVRRYASLKQQRKELYRKQAETRKQQHLEMANAILSQGDTFIVENNPIDAWVRRAKETKKNKTGKIRCKKRYGKSVANHAPAMFVSILKNKVQSLGGMFREVDPGYAATQFDFTNGVFTKHEVSERSITLSNGRTHQRDMLSAFNLQHIGQELKEYDIEQMQADYSIFCRLEAAEQERFKETRRNERDALYFVGAFAKKLRHEPQEETVANRHNGGVGRKHCNTLCTENAKITGSGLVRESIERVSEAPEECHHIGNQPIILDGL

SEQ ID NO: 3209 - protein, 1347 aa, unidentified
  REGION 1..1347: note = Description of Unknown: uncultivated organism sequence
  REGION 1..1347: note = Category: MG91 effectors
  REGION 1..1347: note = Description: MG91-401 effector
MEEKEYYLGLDMGTNSVGWAVTDPQYTILRAKGKDMWGIREFESAETAEKRRGHRTSRRRRQREVVRMGLVKDYFSDAINNVDGNFYARLENSKYHLEDKDEAVRNKNGIFADEHYTDKEYYAEYPTIYHLIMELINNPAPHDVRLVYLAVANLFKRRGHFLNAGLSEDGGNQSMQTAYDGFNTTCNETLGFSFPGINATQIEEVLKNRNYSKTVKSEKLAELLGVEKKEKQRIEILRAIAGRKVNAKVIFPNVETEDKVEFSFSDAAFDDNATELMTLLGDECYSLVLCMREMYDIGTLAEIMHGCQYLSESRMADYQKHHEDLVLLKSVIKSECTQKQYDELFRLDGEGSYSAYVNSTLAKNHKQRRSMKGRTRDDFYKKVRGLIGKSSNPDAIKICTEIENETFMPKMLTSANGIIPNQVHYKELKAILSNAEKYLSFLLEKDESGLTTSDRIQRLYKFRIPYYVGPVSNRDGKGNGWAVRKEEGTVLPWNLEEKIDLSKTKEAFIENLIRRCTYISDEKVLPKNSLIYEKFTVLNEINNIRINDERISVDLKQDIYNELFKKGKKVTRKTLAKYLINRGVIEAENQISGIDIAINNSLSSYGKFKAVFGESMDTDTTKKMVEDIIKTSTIYGDDKRELKNILRDKYGEILSEDQIKRIAGFRFKDWGRLSRAFLELAGADCRTGEVTSIIQALWESQLNLMELLHSEDYTFGESLNEKLVKNEKSLSEITAEDLDDYYFSAPVKRMAWQTILLIKEISKIKGCEPSKIFIEMTRTDEEKGDKGRKNSRAKELTALYKNIKKEGKAWIELIGKEDASGRLKSKKMYLYIKQMGRDMYTGEQIDLDRLFDDNLYDIDHIYPRHFVKDNNIENNLVLVNKAKNSRKSDNYPLDSDIVRNPKVRELWEMLHTNHLMSDEKYHRLTSRKAFTDEDMAGFIARQLVETGQATKGVADLLKELTSSEIIYSKAGNVSDFRHAYDIPKSRIVNEFHHAHDAYLNIVVGNAYYTKFTSNPLNYIRNEYKKNTKENNYHLNKIFESTISRNGYVAWLAGSDKNPGTIQTVKKMLSRNTPLMTRMTFVIHGSIAKETLCGKNIAKEDSYLPLKGSDPRMSVEKYGGFNKASGAYFFLVEHELKGKKVRTIETVPVYLMKKLSDERELQKYCEEKLGLINPSIRLKQIKMQSLIKLNGYFVNVTGRTNKQLTLRNAVNLKLDKEDIYIIHLVEKCIGEERDDRLSEESILSLYQTLTEKQASGIYRNRPNSVYEKLNEGMIRFKNLERKQQIKVLANILNLTMVGKAQADLKDIGGSANSGVMLMAKKINNYNEVKLINQSVTGLYQTEVDLLTV

SEQ ID NO: 3210 - protein, 1115 aa, unidentified
  REGION 1..1115: note = Description of Unknown: uncultivated organism sequence
  REGION 1..1115: note = Category: MG91 effectors
  REGION 1..1115: note = Description: MG91-402 effector
MRAICGLKINAYTLFSDQLPDDTTKIDLCVSDASFDEKSEELVSLIGEDLFQIILNIKEIYDIGSLAGILKGYTYLSQARVAAYDKHKHDLKLLKSSIKKYCTKEEYNNFFNSDADGSYASYIGSFNSGNKERRVGSKRTSEDLYKEIKKLLKGANKSDPAINEIFTSIETESFLPKQLTASNGIIPNQVHSKEMARILTNAENYLPFLKETDENNLSISNRILQLYKFQIPYYIGPVTEKSQRDGGNGWVIRKDNGRVFPWNIEEKIDVKATSEAFISRMVRRCTYMNGKQVLPKASLEYESFRVLNEINNLRIDGERIPVTLKQDIYTDLFQKGKKVTKKQLCNYLATRGLIESSEQVTGIDIAINNSLSTYGKFKAIFGEDIKLDHIQHMIEDIVFWCTVYGDSKQFLKEQIEDKYKGKLSPEQMKRILGFKFKDWGNLSKEFFELKGADKSTGEAVSIIRALWENNLNLMELINSPEFDFKEQLADYEANSLKTLSDFEPEDLNDYYFSAPVRRMIWQTTLIIKELVHVLGKEPARIFIEMTREKDASRGRTLSRKKKFEDLYKNVKDENTDWAKVIEHADESGTIRSKKMYLYLTQKGRCMYTGNHIELSDLFNDNLYDIDHIYPRHFVKDDNIDNNLVLVTKEKNAHKSDNYPLEAEIFNKQRNMWTQLRKEGFISEEKYNRLMGRNAFTDEQKAGFIARQLVETSQGTKGVAELFHQLLPNSKIVYAKAGNVSDFRRNREFPKSRLVNDFHHAHDAYLNIVVGNVYYVKFTQNPINYIKNSYNKDMNKNNYNLSRMFDWDVKRGDEVAWIAQKQDGAAGTISTVKKMLSKNTPLMTRLSYEGKGALANETLYSAEKAKGEGYIPFKSSDTKIQDVTKYGGFTSVTGAYFFLVEHDEKKKRIRTIESVPLYLADKIDKDSSELERYCDKLGLVNYDVRVRKIKIGSLIKYNGYFCYITGKTGYRLIVRNATNLCLASNWRKYIKKIEKYKETTIIDNVITAEENIKLYNELLNKFTVGIFGRRPNPIGEKMDSARDKFASLSIENQCLALYQILQLTAILGNESDLQLIGASTHAGKMLISKKIGTDEIYLINQSPTGLFETKIDLQTI

SEQ ID NO: 3211 - protein, 1356 aa, unidentified
  REGION 1..1356: note = Description of Unknown: uncultivated organism sequence
  REGION 1..1356: note = Category: MG91 effectors
  REGION 1..1356: note = Description: MG91-403 effector
MGRDYYLGLDMGTSSVGWAVTDEKYNLLRAKGKDLWGIREFEEAEGGIARRQNRISRRRRQREQVRIGLLKSYFAEEIEKVDPDFLQRLENSKYHLSDKDEKVRYKSAIFNDPEYTDKDYYRDYPTIFHLRAELIHNQEPHDIRLVYLALLNMFKHRGHFLNASLSAEEETQSMSDAYTAFRALVEEVMTANETENLFFPDGKADEIEAIISSRDYNRKRKSELMTEMLGFTKKDKAAQALIKGMCGLTVDVKTVFREIESEAKLSISFSDSNYDEKIVEIQEVLDDEQLELLEAVKTIYDIGSLAGVLKGEKYLSDARITDYNKHKEDLALLKKIIRKYTDQKTYNDLFRGTEPGSYSAYVNSTNSGKKQRRNMGGNAKRNQEAFYASLKKLLNKLPSEDDDVQKILADIDKELFLPKQLTFANGVIPNQVHAREMKAILNNAEQYLPFLTEKDESGLTVSERILKLFSFQIPYYVGPVTTKSSRDGGNGWVVRKESGQVLPWNIEDKIDMDATSKKFIENLIRECTYIAGEKVLPKGSLLYERYCVLNEINNIKIDGRPIDVELKQKIFEDKFMSGKKVTRKQLVTYLHGKGVLEDDAQLTGIDKTINNSLSSYGKFLGVFGDELKKDSCQIMVEDIIRDCTIYGDSKKRLRETLQKKYVDNNNLSESQLKRILGFKFKDWGRMSKEFLEMQGINRETGEVMSLVQAMWETNLNLMELIYSEDFTFAEALQEKQAKDYLTLSEFKFEDLDEYYFSAPVKRMVWQTLLIIKELEKVLGAPPKKVFIEMTRSDGVKGDRGRTISRKKQFEDLYKKIKDESQDWASIIDNADASGKLRSKKMYLYLTQMGKCMYTGKPIDLDDLFDDNKYDIDHIYPRHYVKDDNLGNNLVLVEKKANASKGDRYPLDTDIRGKMHGTWKFLKEKGLITEEKYRRLTGSNPFSEEQQADFIARQLVQTSQGTKGVADLLKQLLPDAKIAYSKASNVSDFRRDYDLPKSRLINDFHHANDAYLNIVVGNAYLVKFTQNPLNYIRSGDVQYNLGRMFEKDIVRNGEVAWLADDGKGNHGTIVTVKKVMARNTPMMTRMVLNGHGAIANATLYPASKASADNYIPLKGSDSKIADVTKYGGFTSVSTSRFVLVEHLVKKERIRTLEALPILVANSCKTMEDIENYCEEELGLIAPKVKLDGIKIQSLLKINGFYVHLSGKTNKQLALRNAVNLCLDAKWKEYIHYLEKASNNGNYGNPICSDMNIELYSILAEKHSSSIFAKRPNPVGTKLVKEKETFSKLELVDQVSVLLQILQLSAIGITQADLRAIGGAGIAGKMLISKDISKQEEALLIMQSPTGLYESTIDLKTI

SEQ ID NO: 3212 - protein, 1356 aa, unidentified
  REGION 1..1356: note = Description of Unknown: uncultivated organism sequence
  REGION 1..1356: note = Category: MG91 effectors
  REGION 1..1356: note = Description: MG91-404 effector
MGRDYYLGLDMGTSSVGWAVTDEKYNLLRAKGKDLWGIREFEEAEGGIARRQNRISRRRRQREQVRIGLLKSYFAEEIEKVDPDFLQRLENSKYHLSDKDEKVRYKSAIFNDPEYTDKDYYRDYPTIFHLRAELIHNQEPHDIRLVYLALLNMFKHRGHFLNASLSAEEETQSMSDAYTAFRALVEEVMTANETENLFFPDGKADEIEAIISSRDYNRKRKSELMTEMLGFTKKDKAAQALIKGMCGLTVDVKTVFREIESEAKLSISFSDSNYDEKIVEIQEVLDDEQLELLEAVKTIYDIGSLAGVLKGEKYLSDARITDYNKHKEDLALLKKIIRKYTDQKTYNDLFRGTEPGSYSAYVNSTNSGKKQRRNMGGNAKRNQEAFYASLKKLLNKLPSEDDDVQKILADIDKELFLPKQLTFANGVIPNQVHAREMKAILNNAEQYLPFLTEKDESGLTVSERILKLFSFQIPYYVGPVTTKSSRDGGNGWVVRKESGQVLPWNIEDKIDMDATSKKFIENLIRECTYIAGEKVLPKGSLLYERYCVLNEINNIKIDGRPIDVELKQKIFEDKFMSGKKVTRKQLVTYLHGKGVLEDDAQLTGIDKTINNSLSSYGKFLGVFGDELKKDSCQIMVEDIIRDCTIYGDSKKRLRETLQKKYVDNNNLSESQLKRILGFKFKDWGRMSKEFLEMQGINRETGEVMSLVQAMWETNLNLMELIYSEDFTFAEALQEKQAKDYLTLSEFKFEDLDEYYFSAPVKRMVWQTLLIIKELEKVLGAPPKKVFIEMTRSDGVKGDRGRTISRKKQFEDLYKKIKDESQDWASIIDNADASGKLRSQKMYLYLTQMGKCMYTGKPIDLDDLFDDNKYDIDHIYPRHYVKDDNLGNNLVLVEKKANASKGDRYPLDTDIRGKMHGTWKFLKEKGLITEEKYRRLTGSNPFSEEQQADFIARQLVQTSQGTKGVADLLKQLLPDAKIAYSKASNVSDFRRDYDLPKSRLINDFHHANDAYLNIVVGNAYLVKFTQNPLNYIRSGDVQYNLGRMFEKDIVRNGEVAWLADDGKGNHGTIVTVKKVMARNTPMMTRMVLNGHGAIANATLYPASKASADNYIPLKGSDSKIADVTKYGGFTSVSTSRFVLVEHLVKKERIRTLEALPILVANSCKTMEDIENYCEEELGLIAPKVKLDGIKIQSLLKINGFYVHLSGKTNKQLALRNAVNLCLDAKWKEYIHYLEKASNNGNYGNPICSDMNIELYSILAEKHSSSIFAKRPNPVGTKLVKEKETFSKLELVDQVSVLLQILQLSAIGITQADLRAIGGAGIAGKMLISKDISKQEEALLIMQSPTGLYESTIDLKTI

SEQ ID NO: 3213 - protein, 1356 aa, unidentified
  REGION 1..1356: note = Description of Unknown: uncultivated organism sequence
  REGION 1..1356: note = Category: MG91 effectors
  REGION 1..1356: note = Description: MG91-405 effector
MKTGNYYVGLDMGTNSVGWAVTDSKYNLIRAKGKDLWGIREFEEARTAADRRSKRVARRRRQRQQVMMGLIRSYFEDEINKIDSQFFQRLDNSFYYLEDKDNAIKDKNVLFNDKNYIDKDYFHEYPTIFHLRKSLIDGTARHDVRFVYLAIINMFKHRGHFLNASLDSDHAYIPMKEILSIFDETASALEKNTWPSLSDFSEQIDKILCDRKISKSKKTEKLNEILGLEKKDEFCEFVKVICGLKSNTAKLFKVEGDETEKKDICFSDAGFDDSLSEIMDVIGEENTELLNSMKNIYDCGVLGEILSGYSFLSEARVALYKKHGDDLKSLKRILKKYNMENEYDFLFREAEAGTYSSYVGSVNCDGNKQRRGMKGRSKEDFYKTVKKILDPLMKSHPQDQDIAFVLEEISKDTFMPKQLTSSNGVIPNQVHAIELKMILKNAEEYLSFLKNKDESGLTVSERIVQLFSYQIPYFIGPTSDKSEKSGGNGWVVRKEPGPVLPWNIEEKIDIGLTNEKFIEKLVRTCTYISGEKVLPKNSILYQKYVVLNEINNIRIDGEKISVELKQDIFNELFLKSNRVTRQKLIKYLNNRGCIQDETQISGLDIKINSGMSTYAKFYSLFGDKMKEDSYVQMAEEIIFLCTVYGDSKKYLRERLIQKCGDSLSEDEIKKIMTMKFSDWGRLSREYITLAGCDKTTGEECTLIGALWNTNLNAMELINNDQFTFHEVLESRRAKDLNTLKDFKSEDLADYYYSAPVKRMIWQTIQILREIESVMGCSPEKVFVEMARRPEDRPKRKDSRKQMFLELYKNIKDEDRNWKELIEREDETGRLRSKKMYLYLTQMGRDMYTGDPIDLDKLFDNNLYDIDHIYPRHYVKDDSIENNLVLVYKPQNANKSDIYPLEKTIRDKQYGFWKGLRNQKLISEEKFNRLVGTKPFTEDQLAGFIARQMVETQQGTKGVAELLGTLLEDSRIVYVKAGNVSDFRRKYGFPKSRIVNDFHHANDAYLNIVVGNVYDVKFTQNPLRFIKDEYLKDKSRNQYNLDKMFDRNIERNGKIAWKAPTEDGEQGTIVTVRRVISKNTPLMTRLSFVGHGQISDETLYGHDDAKAGVYIPFKSRDARLSNVERYGGYNKASIAYFFLVESDNKGKRERTLESVPIYLSGQIKTENDLINYCLNTLGLIKPSIRIAKIRIQSLVEKNGFRFHITGKTNDRLTTRSATSLYVGSDKQSYIHKIEKYIDTGVIEEIMTKEKNIELYDLLTEKHCSGVFSKRPNPVGEKLKLRKEKFKALELPDQLDVLNQVLTLSSIGKAEADLTKIDESKKTGVMLISKKISPEDPVILISQSAIGLYENRINMATV

SEQ ID NO: 3214 - protein, 1119 aa, unidentified
  REGION 1..1119: note = Description of Unknown: uncultivated organism sequence
  REGION 1..1119: note = Category: MG91 effectors
  REGION 1..1119: note = Description: MG91-406 effector
MKQILSLDLGITSVGYSVIQEHETDKYSLIDYGVSMFDKPTDKDGNSKKLLHSQALSAKNLHKLRKKRKQNLASLFDQYHLANKQKLLEQERDNLYKNKWELRAKKVFEEKLSVDEIFTILYHIAKHRGYKSLDSGDLLEELCDSLGIETETAKPKKDDEKGQIKQALKSVEALYEEYPQKTVAQIIYELESKKENPIFRNHDNYNYMIRREYINDEIRKIIKAQIAFGAFRAIDDAFINDVIAVIDDQKESTNDLSLFGKCEYYPEYYVAHQYSLLSDIFKMYQAVANITFNKEKIKITKEQIALIAEDFLGKIKKGKSVKDIKYKDIRKVLKLDDDIKIFNKDDSYLNKGKKQENTITKFHFVDTLSKIDKSFVEDIFASDESYRLMREIFDVLHYQKSPKLIYEQLKNKISDEQVIIDLIRNKKGSSLNISSFAMLQLLPYLEEGLTLDEVKQKIGLQRQEDYAQYKKGIKYLHITSYEKDDELEINNHPIKYAVSAALRVVKHLHAEYGTFDEIKVESTRELSLGEKARKEIEKANRAFEKEIEQIVENAEYQKIAKSYGKNLRKYARKILMWEEQERLDIYSGKSIGITDIFSNSVDLDHIVPQSLGGLSVKHNFVLVHRDENLQKSNQLPMNYIKDTQAYTNRVEHLLREHKINWKKAKNLLATNLDEVFKDRLESKSLRATSYIEALTAQMLKRYYPFKDVQKLKDGSAVRHLQGRATSNIRKVLGVMTKSRETNIHHAIDAILIGVTSHSWLQKLSNTFRENFGCIDDEARKNIKKALPYMDGMEIKDLVKEIEEQYNSFGEDSIFYRDIWGKVKTVNFWVSKKPMSSKIHKDTIYAKKGDGIYTVRENIIAKFIGLKVIPMTSPEEFMKKFHKEILQKMYLFKTNPQDVICKLVEQRGEEIKELLWSFEFLDVKNKEQMSEAKTKLELLIHKDLLDNNGNVIRKVKFYQTNLTGFDVRGGLATKEKTFIGFRAYKEDSKLEYERIDVANVEKIQKTNDGSFKAYKNDIVFFIYNDGSFKGGRVVSYIKKSSGSKLCAFLNPRFPTASEYQPSSFCKIEKGKHSGAKQQSIGSAKGIIKLNLDTLGNIKSYQVLGNVESKILDEIKSIVSH

SEQ ID NO: 3215 - protein, 610 aa, unidentified
  REGION 1..610: note = Description of Unknown: uncultivated organism sequence
  REGION 1..610: note = Category: MG91 effectors
  REGION 1..610: note = Description: MG91-407 effector
MAKETFVLTLPLKVEKWQADILDKRYELLRQVYNMVQRKLIRQYIYFSQQKEFKDCRNDYKRLREFFASHPFHFRGINGKNGEPSDIKFPYTYESRSSNSGKRPSGGISDYVSKLWTHRIGEEKTLSNFGINSYILEELGLHIMKAWEKRLYDHSSSRVSFKDYGDINSFGSRYKKGNFAGFTINLEEKIITYNANGRQGRYADLIKLPIDFSRDKKYYAVSALKGGIDSLRKLIIVRRCIRGRHKYYLQLTIAGEKPQKGRTLGSGRVGIDIGPSTIAVSSLNGVHFEKLADKCDNIEHELYLVNRKLDRSRRASNPQNFNDDGTIKRISRQKGERRIWNESSRYKQLKQTRRELFRRQAEVRKQQHLEMANAMLSQGDTFIVENNPIDAWVRRAKETTKTKTGKNRCKKRYGKTVAHHAPAMFVSILENKVKSLGGRFYEVDPRNAATQFDFTNGEFTKHEVNERSITLSNGRTHQRDMLSAFNLQHLRPESKETKDYDIEQMQADYPFFCKLEAAEQKRFTETRYNERDALYYVGAYKKQLRRQPQKESVANRHNGGVGRKHCNTSLGSENAKITGNGFVRESIERVSQVPDECHLFVSDPIVLDGL

SEQ ID NO: 3216 - protein, 1122 aa, unidentified
  REGION 1..1122: note = Description of Unknown: uncultivated organism sequence
  REGION 1..1122: note = Category: MG91 effectors
  REGION 1..1122: note = Description: MG91-408 effector
MKKILSLDLGITSIGYSVIEEFGNDRYSLIDYGVSMFDKATDKDGNSKKLLHSASTSTSKLYDLRKKRKKDLAQLFHNFGLGDKNSLLSQEKQNIYKNKWYLRCHKAFKEKLNINELFTIFYTLAKHRGYKSLDSSDLLEELCEKLNIPLETKTKKDDERGKIKKALKTIEELKQNSTKTVAQIIYEIELKKENPTFRNHDNYNYMIRREYIDQEIEKIIKTQKDFGLFDDKFDIDNFIEKLKDIITYQNPSTNDMRLFGNCEYYEDEKAAHQYSVISDIFKMYESVSNITFNTKPSIKITKEQINKIADDFFTKIKKGKNIADIKYKDIRKILALSDDTKIFNKDDSYISKGKKVEHTIIKFHFVNNLSKFDNSFIVENLNSLENLKEIFEVLQFEKDPTAIYEKLKDKIEDKQTIINLIKHKSGNSLNISAKAMVEFIPYFKDGLTTDKIKEKLELNRCEDYSKFYKGIKYLNIRQFEQDDNLDINNHPVKYVVSATLRVIKYLHIVCGTFDEIRVESTRELSQNEETKKAIEKANKELEKQINDIVQNKEYQNIAQHYGKNLQKYARKILLYEAQNRRDIYTGEGIEFEDIFTKKVDIDHIVPQSVGGLSVKHNLVLVFRDTNIQKSNQLPMNFVKDKQDFINRVEHLFSEHKINWKKRKNLLATNLDEIYKDTFESKSLRATSYIEALTAQILKRYYPFKDKEKQENGKAVSYIQGRATSNIRKILKVKTKTRDTNIHHAIDAILIGLTNQSWLQKLSNTFRENFGKIDEEARANIKKDMPIFEIIIDDEVKYLEPKELVELIEKNYNYDGENSIFYKDIWGKIKSVNFWVSKKPMVSKIHKDTIYSKKDDGIYTVRENIINHFINLKITPKTSSKKFEEEFNKKILNKMYLFKTNPKDAVCKAIIKRANDIKTLLDSFIDIDTKDKEAMNNAKTKLDELIHKDIPDNNGKPIRKIKFYQTNLTGFDVRGGLATKEKTFIGFKAQIINGKLNYTRIDVANIDKIKKENDNSFKVYKNDLVFFIYTDGTNKGGKIVSFLEDKRIAAFSNPRFPSSIGFQPHFFVTIFNGKANSHKQHSLNKAIGIIKLNLDILGNIKSYQKIGSCESELLEFIKKVIKD

SEQ ID NO: 3217 - protein, 1358 aa, unidentified
  REGION 1..1358: note = Description of Unknown: uncultivated organism sequence
  REGION 1..1358: note = Category: MG91 effectors
  REGION 1..1358: note = Description: MG91-409 effector
MQETGKDYYLGLDMGTNSVGWAVTDENYVLMRAKGKDLWGIREFDEALTAVDRRTHRVARRRRQRETARIGLLKEYFHDAIAEADPNFYQRLDNSKYHEEDKDSAVKGKNGIFNDANYTDKDYFKQYPTIFHLRTELIESTEKHDVRLVYLALLNMFKHRGHFLNAGLSTESENTMDTAYHNFVETAAQTIECNFMETVDIEKIKEILGSRDYSRSKKAELVAQLLHVDSKNKVQMACIKCICGLKVTAAAIFGDKMAADEEKKTDICFSDFGYDEKVPVILETVGEENFELVLAMQEIYDIGSLAGIMKDSLYLSMARVKEYEQHGKDLKILKGVVKKYATKEEYDTLFRTMEEGTYSAYVNSVNTKKKSRRDVKKRTRDEFYGRLKKIISTMPQDDSDVLYIKDKMEKEAFLPKQLTASNGVIPNQIHAREMKKILQNAETYLPFLKEKDTSGLTVSERILKLFSFQIPYYVGPVSEKSKLNGGNGWVVRKEEGTVLPWNIEEKIDMTATSREFVERMVRRCSYLSDERVLPKGSLLYERFCVLNEINAIKVDGVKIPVEIKQDLYSKYFKKGKKVTRKKIAEFLIARGVIKEDQTELISGIDIAVNSTLSTYAKFYAIFGEKMEQDSYKKMVEQIVEWCTIYGDAKKFLEQKIKECYGNILTQEEIKRITGFKFRDWGRLSKEFLELSGCSKATGEVMPLISMMWETNDNLMELLDDNYYTYREALEEKQNNAFKLLADIEPEDLDEMYFSAPVKRMVWQTLCIIKELEKVLGKAPKRLFVEMTRNEQKDKKRTDSRKQQFLDLYKNIKDESRDWKELITRADENGTLKSKKMYLYLTQRGRCMYTGHPIDLEDLFKDNRYDIDHIYPRHFVKDDNIMNNLVLVEKEKNAHKSDNYPLEEEIYKKQLPVWKDLHQCKLITDEKFKRLTGRNEFTDEQKAGFIARQLVETSQGTKGVTTILERALPDTKIVYAKASNVSEFRQKRDLLKSRVVNDFHHAQDAYLNIVVGNVYFVKFTQNPLHFIKAEYDKNKAQYEYNLSRMFDRDVRRGNETAWIGCKKGEEAGTIVTVKKMMAKNTPMLTRLSFEGKGGLADQTLYSAEKAKGNGYIPLKTSDAKMQDVTKYGGFNSVSTAYFFLVEHELKGKKVRTLETVPIIWRDRIEKDETMLLKYCTDVLELKNPSIRVKKIKLQSYIKKDGYYMYITGKTNKQITTKNAVELCVNQRWIDYIKIIEKTVEKKKECEEVNYNKNVEFYDLLLTKHTQEIFSNRPNPVGAKLKQGRDKFLSLTLFEQSTVLYEILQLSIIGNTRADLHSIGGAPISGVMLLSKKITDSKEFILINQSVTGLFEQKVDLLTV

SEQ ID NO: 3218 - protein, 1122 aa, unidentified
  REGION 1..1122: note = Description of Unknown: uncultivated organism sequence
  REGION 1..1122: note = Category: MG91 effectors
  REGION 1..1122: note = Description: MG91-410 effector
MKKILSLDLGITSIGYSVIIEEEIQRYSLLDYGVSMFDKPTDKDGNSKKLLHSQAISAKKLHQLRKERKKNLAKLFEKYNLASAAKLLGQEKKNIYIHKWQLRAKKVFEEKLSVEEIFTIFYHIAKHRGYKSLDSGDLLEELCVDLGIELEQKKEKKDDEKGKIKQALNNIESLRQEYPEKTVAQIIYDVELQKEQPVFRNHDNYNYMIRREHINDEIVTIISKQKEFGNFENIDSEAFIADLIAVIDDQKESTNDMSLFGKCEYYPKEYVAHQYSLLSDIFKMYQAVANITFNKEKIKISKEQIRLIAEDFLNKIKKGKSVKELKYKDVRKVLNLDDSIKIFNKEDSYQRAGKKVENTITKFHFVDTLFKIDKSFIEDIFSADESYALMREIFDVIHKEKSPKRIYEQLKDKVSSEAVIIDLIRYKKGSSLNISSYAMMKFLPYFEEGMTLDAIKEKLNLNRKEDYSEYKKGIKYLHISTYEKDDSLEINNHPVKYVVSAALRVVKHLHAKHGAFDEIKVESTRELSLNDKVKKEIEKVNKEREKEIEKIVSDKEYQTIAQDYGKNIHKYARKILMWEAQERFDIYSGQSIGLDDIFSNRVDIDHIIPQSLGGLYVQHNLVLVHRDENLQKSNQLPMNYIEDKEAYINRVEHLFSEHKINWKKRKNLLATNLDEIYKDTFESKDLRATSYIEALTANILKRYYPFTDEKKSADGSAVRHVQGRATSNIRKVLDVKTKSRESNIHHAVDALLIGVTNHSWLQKLSNTFRENFGKIDDEARQNIKKTLPYIDGVEVKDIVKEIEQNYNSLGEDSIFYKDIWGRVKTVSFWVSKKPMSSKAHKDTIYADKGDGIFTVRESIIAKFINLKITPTTSPEDFMKKFHKEILEKMYLYKTNPNDVICKIVEQRAEEIKELLWSFEFLDAKNKEEMQEAKAKLENLVHRELFDNNGNVIRKVKFYQTNLTGFKVRGGLATKEKTFIGFRAIKKGEKLEYERIDVSNFEKIKKSNDGSFKVYKNDIVFFIFDEENFKGGKIVSFLEDKTIASFSNPRFPAAIKFQPDSFCIIGKDSNGKPKKSSSKQYKLGKAKGIIKLKIDILGNIESYQVLGNAKSKLLDEIKSIVSH

SEQ ID NO: 3219 - protein, 1358 aa, unidentified
  REGION 1..1358: note = Description of Unknown: uncultivated organism sequence
  REGION 1..1358: note = Category: MG91 effectors
  REGION 1..1358: note = Description: MG91-411 effector
MEKEYYLGLDMGTNSVGWAVTDDAYNLIRFKGKDMWGIREFDEANPAVERRTHRTSRRREQRNAVRMGLIRSYFADEIQKVDSNFYQRLDNSFFHVEDKQDNVKDKNGIFNDKNYKDADYYKQYPTIFHLRKELIEDASQKDVRLVYLAVANMFKHRGHFLLSGIGSESSKQTITDLYNQVTGLITEEYGISLKTDIAGTDFEQVLCSREYSRTRKSEKVCEILEIKNSDKLKKAFVKSMCGLSVKITDIIDDTFTEISDEDKKITFSFVDSDYDEKAGVLEEKLGTDVYDIISKLKEIHDKAQVAEIMKNYQYLSFARVADYEKHKKDLKILKRVVKKYFEPTVYDKLFRSEENGTYSAYVNSFNSEEKSRRNYKERKQEDLYNSIKKLLKSVDNVDDTDIEYIKNEMDKENFLPKQLTFKNGVIPNQIHASELKAILKNAEKYLPFLNEKDESGYTVSERILMLFSFQIPYYVGPVSSNSNGWVKRLEPGQVLPWNIDKKIDLKETSEQFIQRMVRNCTYIAGEKVLPKDSLLYENFKVLNEINNLSINGERITVNLKQDLYNTLFLKGKRVTRKQIFNYFHSRGLVEEDSQISGIDIAVNNSLSTYGKFLPLFGEHLKEDKYKKMVDDIVFWCTVYGDSRKFLREQLEEKYSDVLDENQIKRITGMKFKDWGNLSKEFLELSGCCKSTGEVMPLIRAMWETNYNLMELLHSEEFTYSEELEEKQGKIEKVLSEYTIDDLNEEYFSAPVKRMVWQTLLIIKEIEKIMKCPPTRIFVEMTRKDDEKGDNGRKSSRKDQLLALYKKIQSEDKEWKKEMSSRIEDYDKKGALRSKKLYLYFIQKGLDMYTGKPIDLDNLMSANSNYDIDHIYPRHFVKDDNINNNLVLASKPANAEKSDIYPIKDSIYQKMKYTWKVLRDEGLITEEKYKRLTGRNPFTDEQKAGFIARQLVETGQGTKGVADLLTALLPDTKLVYSKAGNVSDFRKKYDIPKSRLINDFHHAHDAYLNIVVGNIYFTKFTSNPLNYIRKECSSKDNKYQYNLGNMYKWDVKRDGKTAWIAAKEGETGTIATVKKMLSRNTPTLTRLTIEGHGGIADATLYSHKKAKQDAYIPLKSSDARMADVTKYGGYSSVTTAYLFLVEHEIKGKKIRTLETVPLYLKDRLENSKEKLEEYCRETLGYTNPSVRMKKIKLQSLIKLNGYYMQISGKTNKQFTVRNYVQFCLNSKWVDYIHKLEKYQDKGVIDDAITDEKNVELYNVLCEKHSVGIFTLRPNPVGDKIKKGYDKFVNLTTEEQIKLLIEIIKLTCVGIVSANLTLIGGASISGKMLISKNITDAKECLLINQSVTGLYENRIDLLRV

SEQ ID NO: 3220 - protein, 1117 aa, unidentified
  REGION 1..1117: note = Description of Unknown: uncultivated organism sequence
  REGION 1..1117: note = Category: MG91 effectors
  REGION 1..1117: note = Description: MG91-412 effector
MAHMKKILSLDLGITSIGYSILDELENDRYSLLDYGVSMFDKPTDKDGNSKKLLHSASMSQTNLYNLRKKRKENLAQLFEEFSFGKKEDFLQQERENLHVNKWELRAKKAFQEKLEVSELFSILYLLAKHRGYKSLDSDDLLEELCQKLELHVDITKKKKDDERGKIKAALVNIEHLREQYPHKTVAQIIYEVEKSKQNPTFRNHDNYNYMIRREYINDEIKKIIKAQESFGLFNFTTDEFIAKLIATIDDQKEATIDPSLFGNCEYYPQEKVAHQYSLLSDIFKMYQSVANITFNKEKVKITPQQIHLVANDFFSKLKKGGKNIVDIKYKDIRKVLKLDENIKIFNKDDSYLNRGKKQEHTITKFHFVANLSKMDNTFIIEILEKANPYEIFREIFDVLAYEKAPQTIYDKLKDTIDDETIVSLIKYKNGKSLNISHYAMTRFLPFFEQGLSTDEIKKKLNLERKEDYSQYKKGIKYLHVKSFEHDENLEINNHPVKYVVSAVLRLIKHLHVNHGPFDEIRVESTRELSQNEQTKKDIVKANRALEKEIDVIIANEEYQKIAQHYGKNLRKYARKILMWEEQERFDIYSGKSIGFEDIFTNVVDLDHIVPRSVGGLSVKHNFVLAHRDINVQKSNRLPLDFVVDTEAFINRVEHLFAEHKINWKKKKNLLATTLDETFKDTFESKDLRATSYIEALSAQILKCYYPFTDKKKQHDGSAVRHIQGRATSNIRKLLHVKTKVRDTNIHHAIDAILIGLTNRSWLQKLSNTFRDNLGVIDDEARAKIKKEMPLIEGIEPKELVTMIEDAYNFYGEDSVFYKDVWGKIKVVNFWVSKKPMVSKIHKDTIYAKKEDGIYTVRESIIDKFAELKTTTTTDADTFMKSFEKNVLHKMYLHKTNPKDFTCKAVTNRADAIYELLKSFDSLDKKDKALMSEAKAKLDDLIHRDILDNNTNVIRKVKFFQTNLTGFNIRGGLATKEKTFIGFKAELKDDKLCYERIDVANFNTIKKENDKSFKAYKNDVIFFMYGDGSFRGGKIVSFLEDKKIAAFSNPKFPVSYKFQPDSFCKDKAHTGAKQHALNKAIGIIKLNLDITGKIKSYQSIGTIESELLQFIKEAIHG

SEQ ID NO: 3221 - protein, 603 aa, unidentified
  REGION 1..603: note = Description of Unknown: uncultivated organism sequence
  REGION 1..603: note = Category: MG91 effectors
  REGION 1..603: note = Description: MG91-413 effector
MAKENFVLTLPLRVDKCQADILDKRYELLRLIYNMVQQKLVRQYIYFSQQKAFKACESFEQKREFFNTHPFHFKGIKGKNGELCDIKFPYTYESRSSSSGKRPSGGISDYVSKLWSHKVGADKRLVDFGLNGSIMEELGLHVMKAWEDRLYKYKTKRVSFKGYGAINSLGCRYHKGNFAGFTINLEEGFITFNTNGRHGQFADIITLPIDFSREKKGYAAEAFKSGVDSLRKLIIVRRCIRGRNKYYLQLTISGEKPQKGRTLGKGNVGIDIGPSTIATSSLQGVHFDKLADKCDNIEHELYLINRKLDRSRRVNNPENYNPDGTIKRGVRLVWKKDKDVRRYASLKQQRKELYRKQAETRKQQHLEMANAILSQGDTFIVENNPIDAWVRRAKETKKNKTGKIRCKKRYGKSVANHAPAMFVSILKNKVQSLGGMFREVDPGYAATQFDFTNGVFTKHEVSERSITLSNGRTHQRDMLSAFNLQHIGQELKEYDIEQMQADYSIFCRLEAAEQERFKETRRNERDALYFVGAFAKELRHEPQEETVANRHNGGVGRKHCNTLCTENAKITGSGLVRESIERVSEAPEECHHIGNQPIILDGL

SEQ ID NO: 3222 - protein, 530 aa, unidentified
  REGION 1..530: note = Description of Unknown: uncultivated organism sequence
  REGION 1..530: note = Category: MG91 effectors
  REGION 1..530: note = Description: MG91-414 effector
MTSQSFVIELPIAVDDAEMRTIVRKLEFARQLHNATLGTAIGQLQQMRQDTAWKQACAMPKGKERTAAFRALDRKYGLTEYDLHSVIARHREGSGRKAELGINETQKIATRVFQAINRYKLGLGGMPRFKSSKRGLHSIEGKTNKTGLKFRPGKKVLNWCGHDYRVLIDPKDDYIQRALKENERSDQYRKIKYCRLVRKRIRSADRFFLQVVLEGTAPVKHVYAPVTERAAIDPGPQSIALFSKAFAGKIQVAGSNNFNEAASRRLLRAMDRSLRRNNPDAYNEDGTINKGAKLAKSKNYQRKVDQLHEMHRVAAAQRKCRHGQTINLLLSIAGDIRIEKNSWKAFQRGHFGKSLGKSAMSGFIAQLKSKAESAGLKVTEVNPYKLKLSQYDPYTDTYRKKDLSERWQEMKAGSGQYIQRDVLSALLLYCADIEKEIHIPKVAVEQLEGAKQLLTDAGYVVLKSTSSRDQRDPRLAPEPKAMTPEMARQKILRGAGDSHLPTDQALGRIRAGGKVSTWSKETFPLQRGVV

SEQ ID NO: 3223 - protein, 530 aa, unidentified
  REGION 1..530: note = Description of Unknown: uncultivated organism sequence
  REGION 1..530: note = Category: MG91 effectors
  REGION 1..530: note = Description: MG91-415 effector
MTSQSFVIELPIAVDDAEMRTIVRKLEFARQLHNATLGTAIGQLQQMRQDTAWKQACAMPKGKERTAAFRALDRKYGLTEYDLHSVIARHREGSGRKAELGINETQKIATRVFQAINRYKLGLGGMPRFKSSKRGLHSIEGKTNKTGLKFRPEKKVLNWCGHDYRVLIDPKDDYIQRALKENERSDKYRKIKYCRLVRKRIRSSDRFFLQVVLEGTAPVKHVYAPVTERAAIDPGPQSIALFSKEFAGKIQVAGSNNFNEAASRRLLRAMDRSLRRNNPDAYNENGTIKKGAKLVKSKNYQRKVDRLREMHRVAAAERKCRHGQTINLLLSIAGDIRIEKNSWKAFQRGHFGKSLGKSAMSGFIAQLKSKAASAGLKVTEVNPYKLRLSQYDPYTDTYRKKDLSERWQEMKAGSGLYIQRDVLSALLLYCADIEKEIHIPKVAVEQLEGAKQFLTDAGYVVLKSTSSRDQRDPRLAPEPKAMTPEMARQKILRGAGDSHLPTDQALGRIRAGGKVSTWSKETFPLQRGVV

SEQ ID NO: 3224 - protein, 530 aa, unidentified
  REGION 1..530: note = Description of Unknown: uncultivated organism sequence
  REGION 1..530: note = Category: MG91 effectors
  REGION 1..530: note = Description: MG91-416 effector
MPSQSFVIELPIAVDDAEMRTIVRKLEFARQLHNATLGTAMGQLQQMRQDAAWKEACVMPKGKERAAAFRALDRKYGLTEYDLHSVIARHREGSGRKAELGINETQKIATRVFQAINRYKLGLGGMPRFKSSKRGLHSIEGKTNKTGLKFRPEKKVLNWCGHDYRVLIDPKDDYIQRALKENERSDKYRKIKYCRLVRKRIRSSDRFFWQVVLEGTAPVKHVYAPVTERAAIDPGPQSIALFSKAFAGKIQVAGSNNFNEAASRRLLRAMDRSLRRNNPDAYNENGTIKKGAKLVKSKNYQRKVDRLREMHRVAAAERKCRHGQTINLLLSIAGDIRIEKNSWKAFQRGHFGKSLGKSAMSGFIAQLKSKAASAGLKVTEVNPYKLRLSQYDPYTDTYRKKDLSERWQEMKAGSGLYIQRDVLSALLLYCADIEKEIHIPKVAVEQLEGAKQFLTDAGYVVLKSTSSRDQRDPRLAPEPKAMTPEMARQKILRGAGDSHLPTDQALGRIRAGGKVSTWSKETFPLQRGVV

SEQ ID NO: 3225 - protein, 530 aa, unidentified
  REGION 1..530: note = Description of Unknown: uncultivated organism sequence
  REGION 1..530: note = Category: MG91 effectors
  REGION 1..530: note = Description: MG91-417 effector
MTSPSFVIELPIAVDDAEMRTIVRKLEFARQLHNATLGTAMGQLQLMRQDAAWKEACVMPKGKERAAAFRALDRKYGLTEYDLHSVIARHREGTGRKAELGINETQKIATRVFQAINRYKLGLGGMPRFKSFKRGLHSIEGKTNKTGLKFKPEQKVLNWCGHDYRVLIDPKDDYIQRALKDNERSDQYRKIKYCRLVRRRIRSADRFFLQVVLEGTAPVKHVYAPVTERAAIDPGPQSIALFSKAFAGKIQVAGSNNFNEAASRRLLRAMDRSLRRNNPDAYNEDGTINKGVKLAKSKNYQRKVDQLHEMHRVAAVQRKCRHGQTINLLLSIAGDIRIEKNSWKAFQRGHFGKSLGKSAMSGFIAQLKSKAESAGLKVTEVNPYKLKLSQYDPYTDTYRKKDLSERWQEMKAGSGQYIQRDVLSALLLYCADIEKEIHIPKAAVEQLEGAKQLLTDAGYVVLKSTSSRDQRDPRLAPEPKAMTPEMARQKILRGAGDSHLPTDQALGRIRAGEKVSTWSKETFPLQRGVV

SEQ ID NO: 3226 - protein, 497 aa, unidentified
  REGION 1..497: note = Description of Unknown: uncultivated organism sequence
  REGION 1..497: note = Category: MG91 effectors
  REGION 1..497: note = Description: MG91-418 effector
MTSPTFIIELPIRVSDSESRTILRKLEFARQLHNATLGTALGQLQQLRQDSEWEKACLMPKGKERSELFRKLDRKYQLTEYDLHTVIAKHRQRSGRKTELGINETQKIATRVFQAVNRYKLGLGGRPRFKSLSRGLRSIEGKSNKTGLKFNIEKSVLSWCKHDYCVFIDPQDDFLQRALRSEGRSGFKKVKYCRLVRKTIKGKNRFYLQVVLEGQAPIKHIYASTSERLSIDPGPQTIAVFSDVWAGKIKVSPTAQVDEKRLRCIQRSMDRSLRKSNPDCYESDGTLRKGCVLKKTKGYEKRIQRLQECHRKAAATRRCEHGQLINLLLSMAGDIRVEKNQWKAFQRGHFGKSLGKSGISGFIERLKSKAESAGLKVTEVKPYKLKLSQYDPYTDQYRKKSLNERWHSLGESSEWIQRDVMSALLLQCADLEEEKHIPTEVIKTLEGVKQLLRDAGYVILKPSSNGESNPTFASEPKAVTPEKVRLEIFCGASDSYL

SEQ ID NO: 3227 - protein, 444 aa, unidentified
  REGION 1..444: note = Description of Unknown: uncultivated organism sequence
  REGION 1..444: note = Category: MG91 effectors
  REGION 1..444: note = Description: MG91-419 effector
MQGTGKAAGRKAELGINETQKIATRVFQAINRYKLGLGGMPRFKSSKRGLHSIEGKTNKTGLKFRPEKKVLNWCGHDYRVLIDPKDDYIQRALKENERSDKYRKIKYCRLVRKRTRSSDRFFLQVVLEGAAPVKHVYAPVTERAAIDPGPQSIALFSKAFAGKIQVAGSNNFNEAASRRLLRAMDRSLRRNNPDAYNEDGTIKKGAKLAKSKNYQRKVDQLHEMHRVAAAQRKCRHGQTINLLLSIAGDIRIEKNSWKAFQRGHFGKSLGKSAMSGFIAQLKSKAASAGLKVTEVNPYKLKLSQYDPYTDTYRKKDLSERWQEMKAGRGQYIQRDVLSALLLYCADIEKEIHIPKVAVEQLEGAKQFLTDAGYVVLKSTSSRDQRDPRLASEPKAMTPEMARQKILRGAGDSHLPTDQELGQIRAGGKVSTWSKETFPLQRGVV

SEQ ID NO: 3228 - protein, 530 aa, unidentified
  REGION 1..530: note = Description of Unknown: uncultivated organism sequence
  REGION 1..530: note = Category: MG91 effectors
  REGION 1..530: note = Description: MG91-420 effector
MPSQSFVIELPIAVDDAEMRTIVRKLEFARQLHNATLGTAMGQSQQMRQDAAWKEACVMPKGKERAAAFRALDRKYGLTEYDLHSIIARHREGSGRKAELGINETQKIATRVFQAINRYKLGLGGMPRFKSSKRGLHSIEGKTNKTGLKFRPEKKVLNWCGHDYRVLIDPKDDYIQRALKENERSDKYRKIKYCRLVRKRIRSSDRFFWQVVLEGTAPVKHVYAPVTERAAIDPGPQSIALFSKAFAGKIQVAGSNNFNEAASRRLLRAMDRSLRRNNPDAYNENGTIKKGAKLVKSKNYQRKVDRLREMHRVAAAERKCRHGQTINLLLSIAGDIRIEKNSWKAFQRGHFGKSLGKSAMSGFIAQLKSKAASAGLKVTEVNPYKLRLSQYDPYTDTYRKKDLSERWQEMKAGSGLYIQRDVLSALLLYCADIEKEIHIPKVAVEQLEGAKQFLTDAGYVVLKSTSSRDQRDPRLAPEPKAMTPEMARQKILRGAGDSHLPTDQALGRIRAGGKVSTWSKETFPLQRGVV

SEQ ID NO: 3229 - protein, 530 aa, unidentified
  REGION 1..530: note = Description of Unknown: uncultivated organism sequence
  REGION 1..530: note = Category: MG91 effectors
  REGION 1..530: note = Description: MG91-421 effector
MTSPSFVIELPIAVDDAEMRTIVRKLEFARQLHNATLGTAMGQLQLMRQDAAWKEACVMPKGKERAAAFRALDRKYGLTEYDLHSVIARHREGTGRKAELGINETQKIATRVFQAINRYKLGLGGMPRFKSFKRGLHSIEGKTNKTGLKFKPEQKVLNWCGHDYRVLIDPKDDYIQRALKDNERSDQYRKIKYCRLVRRRIRSADRFFLQVVLEGTAPVKHVYAPVTERAAIDPGPQSIALFSKAFAGKIQVAGSNNFNEAASRRLLRAMDRSLRRNNPDAYNENGTIKKGAKLVKSKNYQRKVDRLREMHRVAAAERKCRHGQTINLLLSIAGDIRIEKNSWKAFQKGHFGKSLGKSAMSGFIAQLKSKAESAGLKVTEVNPYKLKLSQYDPYTDTYRKKDLSERWQEMKAGSGQYIQRDVLSALLLYCANIEKEIHIPKVAVEQLEGAKQFLTDAGYVVLKSTSSRDQRDPRLAPEPKAMTPEMARQKILRGAGDSHLPTDQELGRIRAGGKVSTWSKETFPLQRGVV

SEQ ID NO: 3230 - protein, 497 aa, unidentified
  REGION 1..497: note = Description of Unknown: uncultivated organism sequence
  REGION 1..497: note = Category: MG91 effectors
  REGION 1..497: note = Description: MG91-422 effector
MTSPTFIIELPIRVSDSESRTILRKLEFARQLHNATLGTALGQLQQLRQDSEWEKACLMPKGKERSELFRKLDREYQLTEYDLHTVIAKHRQRSGRKTELGINETQKIATRVFQAVNRYKLGLGGRPRFKSLSRGLRSIEGKSNKTGLKFNIEKSVLSWCKHDYCVFIDPQDDFLQRALRSEGRSGFKKVKYCRLVRKTIKGKNRFYLQVVLEGQAPIKHIYASTSERLSIDPGPQTIAVFSDVWAGKIKVSPTAQVDEKRLRCIQRSMDRSLRKSNPDCYESDGTLRKGCVLKKTKGYEKRIQRLQECHRKAAATRRCEHGQLINLLLSMAGDIRVEKNQWKAFQRGHFGKSLGKSGISGFIERLKSKAESAGLKVTEVKPYKLKLSQYDPYTDQYRKKSLNERWHSLGESSEWIQRDVMSALLLQCADLEEEKHIPTEVIKTLEGVKQLLRDAGYVILKPSSNGESNPTFASEPKAVTPEKVRLEIFCGASDSYL

SEQ ID NO: 3231 - protein, 530 aa, unidentified
  REGION 1..530: note = Description of Unknown: uncultivated organism sequence
  REGION 1..530: note = Category: MG91 effectors
  REGION 1..530: note = Description: MG91-423 effector
MTSQSFVIELPIAVDDAEMRTIVRKLEFARQLHNATLGTAMGQLQQMRQDAAWKEACVMPKGKERAAAFRALDRKYGLTEYDLHSVIARHREGSGRKAELGINETQKIATRVFQAINRYKLGLGGMPRFKSSKRGLHSIEGKTNKTGLKFRPEKKVLNWCGHDYRVLIDPKDDYIQRALKENERSDKYRKIKYCRLVRKRIRSADRFFLQVVLEGTAPVKHVYAPVTERAAIDPGPQSIALFSKAFAGKIQVAGSNNFNEAASRRLLRAMDRSLRRNNPDAYNEDGTIKKGAKLVKSKNYQRKVDRLREMHRVAAAERKCRHGQTINLLLSIAGDMRIEKNSWKAFQRGHFGKSLGKSAMSGFIAQLKSKAASAGLKVTEVNPYKLKLSQYDPYTDTYRKKDLSERWQEMKAGSGQYIQRDVLSALLLYCADIEKEIHIPKVAVEQLEGAKQLLTDAGYVVLKSTSSRDQRDPRLAPEPKAMTPEMARQKILRGAGDSHLPTDQALGRIRAGGKVSTWSKETFPLQRGVV

SEQ ID NO: 3232 - protein, 530 aa, unidentified
  REGION 1..530: note = Description of Unknown: uncultivated organism sequence
  REGION 1..530: note = Category: MG91 effectors
  REGION 1..530: note = Description: MG91-424 effector
MTSPSFVIELPIAVDDAEMRTIVRKLEFARQLHNATLGTAMGQLQQMRQDAAWKEACVMPKGKERAAAFRALDRKYGLTEYDLHSVIARHREGTGRKAELGINETQKIATRVFQAINRYKLGLGGMPRFKSFKRGLHSIEGKTNKTGLKFKPEQKVLNWCGHDYRVLIDPKDDYIQRALKDNERSDQYRKIKYCRLVRRRIRSADRFFLQVVLEGTAPVKHVYAPVTERAAIDPGPQSIALFSKAFAGKIQVAGSNNFNEAASRRLLRAMDRSLRRNNPDAYNEDGTINKGVKLAKSKNYQRKVDQLHEMHRVAAVQRKCRHGQTINLLLSIAGDIRIEKNSWKAFQRGHFGKSLGKSAMSGFIAQLKSKAESAGLKVTEVNPYKLKLSQYDPYTDTYRKKDLSERWQEMKAGSGLYIQHDILSALLLYCADIEKEIHIPKVAVEQLEGAKQFLTDAGYVVLKSTSSRDQRDPRLASEPKAMTPEMARQKILRGAGDSHLPTDQELDRIRAGGKVSTWSKETFPLQRGVV

SEQ ID NO: 3233 - protein, 525 aa, unidentified
  REGION 1..525: note = Description of Unknown: uncultivated organism sequence
  REGION 1..525: note = Category: MG91 effectors
  REGION 1..525: note = Description: MG91-425 effector
MTSQSFVIELPIAVDDAEMRTIVRKLEFARQLHNATLGTAMGQLQQMRQDAAWKEACVMPKGKERAAAFRALDRKYGLTEYDLHSVIARHREGSGCKAELGINETQKIATRVFQAINRYKLGLGGMPRFKSSKRGLHSIEGKTNKTGLKFRPEKKVLNWCGHDYRVLIDPKDDYIQRALKENERSDKYRKIKYCRLVRKRIRSADRFFLQVVLEGTAPVKHVYAPVTERAAIDPGPQSIALFSKAFAGKIQVAGSNNFNEAASRRLLRAMDRSLRRNNPDAYNEDGTIKKGAKLVKRKNYQRKVDRLREMHRVAAAERKCRHGQTINLLLSIAGDIRIEKNSWKAFQRGHFGKSLGKSAMSGFIAQLKSKAASAGLKVKEVNPYKLKLSQYDPYTDTYRKKDLSERWQEMKAGSGQYIQRDILSALLLYCADIEKEIHIPKVAVEQLEGAKQFLTDAGYVVLKSTSSRDQRDLRLAPEPKAMTPEMARQKILRGAGDSHLPTDQALGRIRAGGKVSTWSKETFPL

SEQ ID NO: 3234 - protein, 530 aa, unidentified
  REGION 1..530: note = Description of Unknown: uncultivated organism sequence
  REGION 1..530: note = Category: MG91 effectors
  REGION 1..530: note = Description: MG91-426 effector
MTSPSFVIELPIAVDDAEMRTIVRKLEFARQLHNATLGTAMGQLQLMRQDAAWKEACVMPKGKERAAAFRALDRKYGLTEYDLHSVIARHREGTGRKAELGINETQKIATRVFQAINRYKLGLGGMPRFKSFKRGLHSIEGKTNKTGLKFKPEQKVLNWCGHDYRVLIDPKDDYIQRALKDNERSDQYRKIKYCRLVRRRIRSADRFFLQVVLEGTAPVKHVYAPVTERAAIDPGPQSIALFSKAFAGKIQVAGSNNFNEAASRRLLRAMDRSLRRNNPDAYNEDGTINKGVKLAKSKNYQRKVDRLHEMHRVAAAQRKCRHGQTINLLLSIAGDIRIEKNSWKAFQRGHFGKSLGKSAMSGFIAQLKSKAESAGLKVTEVNPYKLKLSQYDPYTDTYRKKDLSERWQEMKAGSGQYIQRDVLSALLLYCADIEKEIHIPKAAVEQLEGAKQLLTDAGYVVLKSTSSRDQRDPRLAPEPKAMTPEMARQKILRGAGDSHLPTDQALGRIRAGEKVSTWSKETFPLQRGVV

SEQ ID NO: 3235 - protein, 1047 aa, unidentified
  REGION 1..1047: note = Description of Unknown: uncultivated organism sequence
  REGION 1..1047: note = Category: MG91 effectors
  REGION 1..1047: note = Description: MG91-427 effector
MTAFKYYLGLDMGTNSVGWAATDPEYRLLKAKGKDLWGIREFNEASGAVERRTHRISRRRRQREQVRIGILKDYFHDAICEVDPSFFRRLENSKYHEEDKDVEVRYKNNIFNDGNYTDKDYFNEYPTIYHLRNELISSTEKHDVRLVFLALLNMFKHRGHFLNAGLGENNGESNIDNAYFELTELLSELTEYHLSQDIDCKQIEAILSRRDMSRTHKAEELAGVLHVDLKNKPYKELIRGLCGLKFNACVVFPDVQSEEVTKLDICLSESSFDEKSDEIANIIGEDYFEIIMAMKEMFDIGSLASIMKGHNYLSQARVASYTKHKEDLKLLKEVIKKYCGKKEYDKFFNSDADGSYASYVGSYNSKNKERRVGNKRTSEELYKEIKKLLKDAPKEDENVQKILTSIENETFLPKQLTASNGVIPNQVHAREMKKILSNAENYLPFLTEKDETGLSVSERILKLFTFQIPYYVGPTSENSGKNGGNGWVVRREDGQVLPWNIDEKIDMKATSEAFISRMVRRCTYISGEQVLPKASLEYQSYCVLNEINNIKIDGERISVELKQDIYKAVFQKGKKVTKKQLCKYLHTRGIIETEEQVTGVDVSINNALTTYGKFKPIFGEDISKDSVQKMIEDIVFWCTVYGDSKKFLKDRIEEKYGNKLSEEQIKRILGFKFKDWGNLSKKFLELNGADTSTGESISIIRALWNNNLNLMELINSSLYNYKECLAEYQNTMLKTLSEIEAEDLNEYYFSAPVRRIIWQTILVIKELVKVLGCEPERIFVEMTRKPDEHKTRTSSRRNKFEELYKKVKDEATDWMQVIAKAEEDGKIRSKKMYLYLTQKGRCMYTGKHIELDDLFDKNLYDIDHIYPRHFVKDDNIDNNLVLVCKEKNAHKSDHYPIEEEIFLSQKKMWLELRKSGFITEEKYNRLMGRSPFSDEQKAGFIARQLVETSQGTKGVANILRQLLPGSKIVYAKASNVCPTGKIGLLSSMFTNPDYRRKGIAKELLSRVVNDAREYGCGTVQITASDMGVKLYTDFGFVHNDNFMQYKI

SEQ ID NO: 3236 - protein, 412 aa, unidentified
  REGION 1..412: note = Description of Unknown: uncultivated organism sequence
  REGION 1..412: note = Category: MG91 effectors
  REGION 1..412: note = Description: MG91-428 effector
MIAKHRQRSGRKTELGINETQKIATRVFQAVNRYKLGLGGRPRFKSLSRGLRSIEGKSNKTGLKFNIEKSVLSWCKHDYCVFIDPQDDFLQRALRSEGRSGFKKVKYCRLVRKTIKGKNRFYLQVVLEGQAPIKHIYASTSERLSIDPGPQTIAVFSDVWAGKIKVSPSAQVDEKRLRCIQRSMDRSLRKSNPDCYESDGTLRKGCVLKKTKGYEKRIQRLQECHRKAAATRRCEHGQLINLLLSMAGDIRVEKNQWKAFQRGHFGKSLGKSGISGFIERLKSKAESAGLKVTEVKPYKLKLSQYDPYTDQYRKKSLNERWHSLGESSEWIQLDVMSALLLQCADLEEEKHIPTEVIKTLEGVKQLLRDAGYVILKPSSNGESNPTFASEPKAVTPEKVRLEIFCGASDSYL

SEQ ID NO: 3237 - protein, 637 aa, unidentified
  REGION 1..637: note = Description of Unknown: uncultivated organism sequence
  REGION 1..637: note = Category: MG91 effectors
  REGION 1..637: note = Description: MG91-429 effector
MLTKELRQEALKKGLHYPKVENSVEFYITKNLMIYDFVNENRISMLRVCIAEKKAGIYDTFTKTWADCLLSSFLGKAGISVSERLAFALSAEAKKRLSSGQENFDYLALYKIDQQISYAKNWEKRHTADERKKEISQIMAGTNKRLSAGFTKFNHSLFGDCKRIMYSKSEKAVYCPECESISRISSPPKKGSLYRCPVCRFTAKVSQAENPLTEVHWSCIVQPAGKRSIIRYFCNDFSLQFGKCKIASEEKFRTILEADGSRIELMQTGNGWEDYKEKRYGLYNPSKRDVPYDMYLYGNVKAIQKISAYEHSMLDVWVKQHKNKKNELYTVYLIENYISQYAKNEIFEKLLKCGLNHIAHEAAFHNYNCTFNFNGNKIEDFLNIKMASLEQLRRIINDPFERDIIAMRYLDKNNLYLKDEELKKFLSLNVSNDMKEKIVRFCKFKKVTFYKVNKYVTENADWSSYFDYIGWTEELKYKKSDSVYYPKDFFKTHDRVFKELEEKKDAIQRKKDKEISKKIADLWEQRMQIPQYHYENNDLFVMMPHGTSDLKKEGRSLNHCVADYKEFVAEEKTQIFFIRKKAAPQKSFYTLEIKNHEIEQCHGRNNVDMTEGIRSFAYGFLKQLNTIKENPAVRAAA

SEQ ID NO: 3238 - protein, 497 aa, unidentified
  REGION 1..497: note = Description of Unknown: uncultivated organism sequence
  REGION 1..497: note = Category: MG91 effectors
  REGION 1..497: note = Description: MG91-430 effector
MPSPTFIIELPIRVSDSESRTILRKLEFARQLHNATLGTALGQLRQLRQDSEWKKACQMSKGKQRSELFRKLDRKYQLSEYDLHAVIANHRQSSGRKAELGINETQKIATRVFQAVNRYKLGLGGRPRFKSLSRGLRSIEGKSNKTGLKFNIEKSVLSWCKHDYRVFIDPRDDYVQRALHSEDRGGFKKIKYCRLVRKTIKGKNRFYLQVVLEGQAPIKHIYASTSERLSIDPGPQTIAVFTEVWAGKIKVSPTAQVDEKRLCCIQRSMDRSLRKSNPDCYESDGTLRKGCVLKKTKGYEKRIQRLQECHRKAAATRRCEHGQLINLLLSMAGDIRVEKNQWKAFQKGHFGKSLGKSGISGFIERLKSKAESAGLKVTEVKPYKLKLSQYDPYTDQYRKKSLNERWHSLGESSEWIQRDVMSALLLQCADLEEEKHIPTEVIKTLEGVKQLLRDAGYVILKPSSNEESNPTFASEPKAVTPEKVRLEIFCGASDSYL

SEQ ID NO: 3239 - protein, 530 aa, unidentified
  REGION 1..530: note = Description of Unknown: uncultivated organism sequence
  REGION 1..530: note = Category: MG91 effectors
  REGION 1..530: note = Description: MG91-431 effector
MTSPSFVIELPIAVDDAEMRTIVRKLEFARQLHNATLGTAMGQLQQMRQDAAWKEACVMPKGKERAAAFRALDRKYGLTEYDLHSVIARHREGTGRKAELGINETQKIATRVFQAINRYKLGLGGMPRFKSFKRGLHSIEGKTNKTGLKFKPEQKVLNWCGHDYRVLIDPKDDYIQRALKDNERSDQYRKIKYCRLVRRRIRSADRFFLQVVLEGTAPVKHVYAPVTERAAIDPGPQSIALFSKEFAGKIQVAGSNNFNEAASRRLLRAMDRSLRRNNPDAYNENGTIKKGAKLVKSKNYQRKVDRLREMHRVAAAERKCRHGQTINLLLSIAGDIRIEKNSWKAFQRGHFGKSLGKSAMSGFIAQLKSKAASAGLKITEVNPYKLRLSQYDPYTDTYRKKDLSERWQEMKAGSGLYIQRDVLSALLLYCADIEKEIHIPKVAVEQLEGAKQFLTDAGYVVLKSTSSRDQRDPRLASEPKAMTPEMARQKILRGAGDSHLPTDQELGQIRAGGKVSTWSKETFPLQRGVV

SEQ ID NO: 3240 - protein, 537 aa, unidentified
  REGION 1..537: note = Description of Unknown: uncultivated organism sequence
  REGION 1..537: note = Category: MG91 effectors
  REGION 1..537: note = Description: MG91-432 effector
MSTKSFIISLPIITGGQDRRRLRKSFSFGCNLQNAVMGGGWDRVLQMRATAEWQATRAMPKGRERTKAFRDLRVRFRLSEYDFHADVAKHRKASGRGHLLGINECQKLASRAWISVERHLYNGGAPRFISSRRGLHSIEGKTNRTGIIWKADQQCVTVCKHVYRVRVDKRDDWLTRALQDPTDPTKPRKVKYCRIVREMRKGKERFFLQLVAEGSSPLKHAYAGKDLRMAIDPGLGSLTYATEDGTIAKVQIAPSADTDHRAIRRIQRAMERSRRATNPDNYEAVDVVRHGKKKKSFKVKSGRLQWRFSKRYESLRAELAEIFRLSAATRKREHGEVCNWLLGHAGHIIVEDNSYKAFQRGRFGKTIGRHAPAALYAQLTNKAESAGLLVEVVSPKKLKPTQHNLLTGQFVKHELWERRVRLGEDDDERWIDRDAAACLNLLYADIENQTYAPERIREAVLAGVTAWLDAGVVVIQAREGITEREFGRFRRRGIPSLTVQGLRQQGFRGRSDSKSGATPRRKASTVSKPSHFSGEVV

SEQ ID NO: 3241 - protein, 537 aa, unidentified
  REGION 1..537: note = Description of Unknown: uncultivated organism sequence
  REGION 1..537: note = Category: MG91 effectors
  REGION 1..537: note = Description: MG91-433 effector
MSTKSFIISLPIITGGQDRRRLRKSFSFGCNLQNAVMGGGWDCVLKMRATPEWQAARAMPKGSERTKAFRDLRMRFRLSEYDFHADVAKHRKASGRGHLLGINECQKLASRAWISVERHLYNGGSPRFISSRRGLHSIEGKTNRTGIIWKADQQCVTVCKHVYRVRVDKRDDWLTRALQDPTDPKKPRKVKYCRIVREMRKGKERFLLQLVAEGTSPLKHAYAGKDLRMAIDPGLGSLTYATEDGTIAKVQIAPSADTDHRAVRKLQRAMERSRQATNPDNYETVEVVRHGKKHKSLKVKSGRLQWRFSKRYEKLRSELAEMLRLCAATRKREHGEVCNWLLGHAGHIIVEDNSYKAFQRGRFGKTIGRHAPAALYAQLTNKAESAGLLVEVVSPKKLKPSQHNLLTDTFVKHELWERRVRLGNDDDDRWIDRDAAACLNLLYADLEKQTYAPERIREAVLAGVTAWLDAGVVVIQAREGITEREFGRFRRRGIPSLTVQGLRQQGFRGRSDSKSGATPRRKASTVSKPSHFSGEVV

SEQ ID NO: 3242 - protein, 497 aa, unidentified
  REGION 1..497: note = Description of Unknown: uncultivated organism sequence
  REGION 1..497: note = Category: MG91 effectors
  REGION 1..497: note = Description: MG91-434 effector
MTSPTFIIELPIRVSDSESRTILRKLEFARQLHNATLGTALGQLQQLRQDSEWDKACLMPKGKERSELFRKLDRKYQLTEYDLHTVIAKHRQRSGRKTELGINETQKIATRVFQAVNRYKLGLGGRPRFKSLSRGLRSIEGKSNKTGLKFNIEKSVLSWCKHDYRVFIDPQDDYLQRALRSEGRSGFKKVKYCRLVRKTIKGKNRFYLQVVLEGQAPIKHIYASTSERLSIDPGPQTIAVFSDVWAGKIKVSPTAQVDEKRLRCIQRSMDRSLRKSNTDCYESDGTLRKGCVLKKTKGYEKRIQRLQECHRKAAATRRCEHGQLINLLLSMAGDIRVEKNQWKAFQRGHFGKSLGKSGISGFIERLKSKAESAGLKVTEVKPYKLKLSQYDPYTDQYRKKSLNERWHSLGESSEWIQRDVMSALLLQCADLEEEKHIPTEVIKTLEGVKQLLRDAGYVILKPSSNGESNPTFASEPKAVTPEKVRLEIFCGASDSYL

SEQ ID NO: 3243 - protein, 525 aa, unidentified
  REGION 1..525: note = Description of Unknown: uncultivated organism sequence
  REGION 1..525: note = Category: MG91 effectors
  REGION 1..525: note = Description: MG91-435 effector
MTSQSFVIELPIAVDDAEMRTIVRKLEFARQLHNATLGTAMGQLQQMRQDAAWKEACVMPKGKERAAAFRALDRKYGLTEYDLHSVIARHREGSGRKAELGINETQKIATRVFQAINRYKLGLGGMPRFKSSKRGLHSIEGKTNKTGLKFRPEKKVLNWCGHDYRVLIDPKDDYIQRALKENERSDQYRKIKYCRLVRKRIRSADRFFLQVVLEGTAPVKHVYAPVTERAAIDPGPQSIALFSKAFAGKIQVAGSNNFNEAASRRLLRAMDRSLRRNNPDAYNEDGTIKKGAKLVKSKNYQRKVDRLREMHRVVAAERKCRHGQTINLLLSIAGDIRIEKNSWKAFQRGHFGKSLGKSAMSGFIAQLKSKAASAGLKVTEVNPYKLKLSQYDPYTDTYRKKDLSERWQEMKAGSGQYIQRDILSALLLYCADIEKEIHIPKVAVEQLEGAKQFLTDAGYVVLKSTSSRDQRDLRLAPEPKAMTPEMARQKILRGAGDSHLPTDQALGRIRAGGKVSTWAKETFPL

SEQ ID NO: 3244 - protein, 530 aa, unidentified
  REGION 1..530: note = Description of Unknown: uncultivated organism sequence
  REGION 1..530: note = Category: MG91 effectors
  REGION 1..530: note = Description: MG91-436 effector
MTSPSFVIELPIAVDDAEMRTIVRKLEFARQLHNATLGTAMGQLQLMRQDAAWKEACVMPKGKERAAAFRALDRKYGLTEYDLHSVIARHREGTGRKAELGINETQKIATRVFQAINRYKLGLGGMPRFKSFKRGLHSIEGKTNKTGLKFKPEQKVLNWCGHDYRVLIDPKDDYIQRALKDNERSDQYRKIKYCRLVRRRIRSADRFFLQVVLEGTAPVKHVYAPVTERAAIDPGPQSIALFSKAFAGKIQVAGSNNFNEAASRRLLRAMDRSLRRNNPDAYNEDGTINKGVKLAKSKNYQRKVDQLHEMHRVAAVQRKCRHGQTINLLLSIAGDIRIEKNSWKAFQRGHFGKSLGKSAMSGFIAQLKSKAESAGLKVTEVNPYKLKLSQYDPYTDTYRKKDLSERWQEMKAGSGQYIQRDVLSALLLYCANIEKEIHIPKVAVEQLEGAKQFLTDAGYVVLKSTSSRDQRDPRLASEPKAMTPEMARQKILRGAGDSHLPTDQELGQIRAGGKVSTWSKETFPLQRGVV

SEQ ID NO: 3245 - protein, 530 aa, unidentified
  REGION 1..530: note = Description of Unknown: uncultivated organism sequence
  REGION 1..530: note = Category: MG91 effectors
  REGION 1..530: note = Description: MG91-437 effector
MTSPSFVIELPIAVDDAEMRTIVRKLEFARQLHNATLGTAMGQLQLMRQDAAWKEACVMPKGKERAAAFRALDRKYGLTEYDLHSVIARHREGTGRKAELGINETQKIATRVFQAINRYKLGLGGMPRFKSFKRGLHSIEGKTNKTGLKFKPEQKVLNWCGHDYRVLIDPKDDYIQRALKDNERSDQYRKIKYCRLVRRRIRSADRFFLQVVLEGTAPVKHVYAPVTERAAIDPGPQSIALFSKAFAGKIQVAGSNNFNEAASRRLLRAMDRSLRRNNPDAYNEDGTINKGVKLAKSKNYQRKVDRLHEMHRVAAAQRKCRHGQTINLLLSIAGDIRIEKNSWKAFQRGHFGKSLGKSAMSGFIAQLKSKAASAGLKVTEVNPYKLRLSQYDPYTDTYRKKDLSERWQEMKAGSGQYIQRDVLSALLLYCADIEKEIHIPKVAVEQLEGAKQFLTDAGYVVLKSTSSRDQRDPRLAPEPKAMTPEMARQKILRGAGDSHLPTDQELGRIRAGGKVSTWSKETFPLQRGVV

SEQ ID NO: 3246 - protein, 538 aa, unidentified
  REGION 1..538: note = Description of Unknown: uncultivated organism sequence
  REGION 1..538: note = Category: MG91 effectors
  REGION 1..538: note = Description: MG91-438 effector
MTTQTFILELPIKADDSQSRTISKKFEYGRMLYNATLGSGLGRLTQMRQDPEWRCACEMSKGKERNELFRRLNRQYRLTEYDFHSDIARHREGTKRKSELGICEAQKLATQAFNAVSRYMFKQGGRPRFKSFKRGLHSLEGKTNTTGLKFKPEKMLLDWCRKTYQVMLDPEDTYALEALYADKERTKFKRIKYNRIVCRNIKGVKRFYLQVVLEGTPPVKHAYAPASERMAIDPGPKAFAVFCPRVQAKVQIAPQAKVNEKAIRRIQRSMDRSLRAKNPNAFDEKGRIKPGVSLAYSKGYQARLTKLREAHRKVAGTRKCEHGELANLLLECAGNIRIEKNSWEAFKRSHFGRSINNSAASGFIQKLKSKAERAGLTVEEVSPYRLKPSQYDPYKDEFVKKALGERWMYLGDESTVIQRDIMSAILIYFADLKNQTHNPEVVKTNLEGLKRGLTDAGYVKHLKLPRSSGSKDPLFAPEPKALTTEELRSKCFRVDSDRHSSTINGTDGKAVGWSETFPLTGELFRDSVLSSVSARGAS

SEQ ID NO: 3247 - protein, 537 aa, unidentified
  REGION 1..537: note = Description of Unknown: uncultivated organism sequence
  REGION 1..537: note = Category: MG91 effectors
  REGION 1..537: note = Description: MG91-439 effector
MSTKSFIINLPIITGDQDRRRLRKSFSFGCNLQNAVMGGGWDRVLKMRATPEWQTARAMPKGSERTKAFRDLRVRFRLNEYDFHADVAKHRKASGRGHLLGINECQKLASRAWISVERHLYNGGSPRFISSRRGLHSIEGKTNRTGIIWKADQQCVTVCKHVYRVRVDKRDDWLTRALQDPTDPTKPRKVKYCRIVREMRKGKERFLLQLVAEGTSPLKHAYAGKDLRMAIDPGLGSLTYATEDGTIAKVQIAPSADTDHRAVRKLQRAMERSRQATNPDNYEAVDVVRHGKKKKSFKVKSGRLQWRFSKRYEKLRSELAEMLRLCAATRKREHGEVCNWLLGHAGSIIVEDNSFKAFQKGHFGKSIGRHAPAAFYTQLTSKAESAGLQVTVVSPRKLKPSQHNLLTDTFVKHELWERRVRLGNDDDDRWIDRDAAACLNLLYADLEKQTYAPERIREAVLAGVTAWLDAGVVVIQAREGYTEREFGRFRRRGIPSLTVQGLRQQGFRGRSDSKSGATPRRKASTVSKPSHFSGEVV

SEQ ID NO: 3248 - protein, 639 aa, unidentified
  REGION 1..639: note = Description of Unknown: uncultivated organism sequence
  REGION 1..639: note = Category: MG91 effectors
  REGION 1..639: note = Description: MG91-440 effector
MLTKELRQEALKKGFHYPKVEKSVEFYRTKNLMIYDFVNENRISMLRVCIAEKKAGIYDTFTKTWADCLLSSFLGKAGISVSELLAFALSAEAKKRLSSGHDNFDYLALYKIDQQISYAKNWEKRHPADERKKEISQIMAGTNKRLSAGFIKFNLDLFGDCKRIMYSKSEKAVYCPECESISRISSPPKKGSLYRCPVCCFTAKVSQAENPLTEVHWSCIVQPAGKRSIIRYFCNDFSLQFGKCKIASEEKFRTILEAGGSRIELMQTGNGWEDYKEKRYGLYYPSKRDVPYDMFLYGNVKAILKIPVYEHSMLDVWVKQHKNKKNELYTVYLIENYISQYAKNEIFEKLLKFGLNHIAHEAAFHNYNRTFNFNGNKIEDFLNIKMASLKQLRRIINDPFERDIIAMRYLDKNNLYLKDEELKKFLSLNVSNDMKEKIVRFCKFKKVTFYKVNNYVTENANADWSSYFDYIGWTEELEYKKSDSVYYPKKFFKTHDRVFKELEEKKDAIQRKKDKEISKKIAGLWEQRMQIPQYHYENNDLFVMMPHGTSDLKKEGRSLNHCVADYKEFVAEEKTQIFFIRKKAAPQKSFYTLEIKNHEIEQCHGRNNVDMTEEIRSFAYGYLKQLNTLNEKAAVKAVA

SEQ ID NO: 3249 - protein, 525 aa, unidentified
  REGION 1..525: note = Description of Unknown: uncultivated organism sequence
  REGION 1..525: note = Category: MG91 effectors
  REGION 1..525: note = Description: MG91-441 effector
MTSQSFVIELPIAVDDAEMRTIVRKLEFARQLHNATLGTAMGQLQQMRQDAAWKEACVMPKGKERAAAFRALDRKYGLTEYDLHSVIARHREGSGRKAELGINETQKIATRVFQAINRYKLGLGGMPRFKSSKRGLHSIEGKTNKTGLKFRPEKKVLNWCGHDYRVLIDPKDDYIQRALKENERSDKYRKIKYCRLVRKRIRSADRFFLQVVLEGTAPVKHVYAPVTERAAIDPGPQSIALFSKAFAGKIQVAGSSNFNEAASRRLLRAMDRSLRRNNPDAYNEDGTIKKGAKLVKSKNYQRKVDRLREMHRVAAAERKCRHGQTINLLLSIAGDIRIEKNSWKAFQRGHFGKSLGKSAMSGFIAQLKSKAASAGLKVTEVDPYKLKLSQYDPYTDTYRKKDLSERWQEMKAGSGQYIQRDILSALLLYCADIEKEIHIPKVAVEQLEGAKQFLTDAGYVVLKSTSSRDQRDLRLAPEPKAMTPEMARQKILRGAGDSHLPTDQALGRIRAGGKVSTWSKETFPL

SEQ ID NO: 3250 - protein, 633 aa, unidentified
  REGION 1..633: note = Description of Unknown: uncultivated organism sequence
  REGION 1..633: note = Category: MG91 effectors
  REGION 1..633: note = Description: MG91-442 effector
MLTKELRQEALKKGFHYPKVEKSVEFYRTKNLMIYDFVCEESAVVRVCISKQHAGIYDVLNNIWKDCTLENYLEDPNQFTNYILSERAKKLLKTDSLFFDSKASFAIDAQIRKAKNWKKINQKENREKEIKKIMAGTNKPVPSGFKIFSEKLLCSAKRIMYSAKEKSLYCPECGNTFQLPDVPKKGSLHTCPACGYSTKVSSAQYLNDIHWSCIVQAAGKRSIIRYFCNELFIEYGKCSTILYEKYRTIVEEDGSMVPLMQTSEGWKDYKGKNYSYFYTVPKREVPNDMYLYGTVEALMKMPALKNSMLDVWVKQHIGADKKLCSEYLVENYIKVYAQTTIYEKLLKHGLNKIAHEAAFYYDSSFHKNEEKVDKFLNLTKGNLDRLREFIPDPSGSNVSAMRYLEKYNVYLKDDELKTFLRLEVSDNMKEQIVKFCKCKKVTLYKINKYVTENANADWSSYFDYIGWTEELDYKKSDSVYYPKKFFKTHDRVFKELEEKKDAIQRKKDKEISKKIADLWEQRMQIPQYHYENNDLFVMMPHGTSDLKKEGRSLNHCVAGYKEFVAEEKTQIFFIRKKAAPQKSFYTLEIKNHDIEQCHGKNNVNMTEEIRAFAYGFLNQLKTIKEKPAVRAAA

SEQ ID NO: 3251 - protein, 525 aa, unidentified
  REGION 1..525: note = Description of Unknown: uncultivated organism sequence
  REGION 1..525: note = Category: MG91 effectors
  REGION 1..525: note = Description: MG91-443 effector
MTSQSFVIELQIAVDDAEMRTIVRKLEFARQLHNATLGTAMGQLQQMRQDAAWKEACVMPKGKERAAAFRALDRKYGLTEYDLHSVIARHREGSGRKAELGINETQKIATRVFQAINRYKLGLGGMPRFKSSKRGLHSIEGKTNKTGLKFRPEKKVLNWCGHDYRVLVDPKDDYIQRALKENERSDKYRKIKYCRLVRKRIRSADRFFLQVVLEGTAPVKHVYAPVTERAAIDPGPQSIALFSKAFAGKIQVAGSNNFNEAASRRLLRAMDRSLRRNNPDAYNEDGTIKKGAKLVKSKNYQRKVDRLREMHRVAAAERKCRHGQTINLLLSIAGDIRIEKNSWKAFQRGHFGKSLGKSAMSGFIAQLKSKAASAGLKVKEVNPYKLKLSQYDPYTDTYRKKDLSERWQEMKAGSGQYIQRDVLSALLLYCADIEKEIHIPKVAVEQLEGAKQFLTDAGYVVLKSTSSRDQRDLRLAPEPKAMTPEMARQKILRGAGDSHLPTDQALGRIRAGGKVSTWSKETCPL

SEQ ID NO: 3252 - protein, 634 aa, unidentified
  REGION 1..634: note = Description of Unknown: uncultivated organism sequence
  REGION 1..634: note = Category: MG91 effectors
  REGION 1..634: note = Description: MG91-444 effector
MLTKDLKQEALKRGFLHSGVNDSIEAYRTRNLTIYDFVCEESAVVRVCISKQHAGIYDVLSNIWKDCMLENYLEDPNQFANYMLSECAKKLLKTDSLFFDSKASFAIDAQIRKAKNWKKINQKENREKEIKKIMAGTNKPVPSGFKIFSEKLLCSAKRIMYSAKEKSLYCPECGNTFQLPDVPKKGSVHTCPACGYRAKVSCVQYQLNDIHWSCIVQAAGKRSVIRYFCNELLLEYGKCSTIFYEKYRTIIEEDGSMVPLMQTSEGWNDYKAKNYSFFYTVPKREVPNDMYLYGTVDALMKMPVLKNSMLDVWVKQHIGADKKLCSEYLVENYIKIYAKTTIYEKLLKCGLNKIAHEAAFYYGSSFHMDEKKIDKFLNLTKGNLNRLREFIPDPSGSNVSAMRYLEKYNVYLKDDELKTFLRLEVSDNMKEQIVKFCKCKKVTLYKINKYVTENANADWSSYFDYIGWTEELDYKKSDSVYYPKKFFKTHDRVFKELEEKKDAIQRKKDKEISKKIAGLWEQRMQIPQYHYEDSQFIVIMPHGTSDLKKEGKSLNHCVVSYKEYVAEKSTQIFFIRKKTDPHKSFYTLEIKNHEIAQCHGKNNVDMTEEIRAFAYGFLNQLNTIKEKPAVRAAA

SEQ ID NO: 3253 - protein, 489 aa, unidentified
  REGION 1..489: note = Description of Unknown: uncultivated organism sequence
  REGION 1..489: note = Category: MG91 effectors
  REGION 1..489: note = Description: MG91-445 effector
MLYNATLGSGLGRLTQMRQDPEWRRALGMVKGKERNELFRRLNRQYRLTEFDFHADIARHREGTKRKSELGINEAQKLATQAFNAVSRYMFKQGGRPRFKSFKRGLHSIEGKTNKTGLKFKPDQMILDWCRKTYQVMLDPKDAYALDALYADKERTQFKRIKYNRIVCRNIKGVKRFYLQVVLEGTPPVKHAYAPASERMAIDPGPKAFAVFCPRVQAKVQVAPRAKVNEKAIRRIQRSMDRSLRATNPNAFDEKGRIKPGVSLAYSKGYQVHLTNLREAHRKAAGTRKCEHGELANLLLECAGNIRIEKNSWEAFKRSHFGRSINNSAASGFIQRLKSKAERAGLTVEEISPFRLKPSQYDPYKDEFVKKALGERWMYLGDESTVIQRDIMSAILIYFADLKNQTHNPEVVKASLEGLKRGLTDAGYVKHLKLPRSSGSKDPLFAPEPKALTTEELRSKCFRVASNSHSSTLNGTDGKAVGWSETFWL

SEQ ID NO: 3254 - protein, 525 aa, unidentified
  REGION 1..525: note = Description of Unknown: uncultivated organism sequence
  REGION 1..525: note = Category: MG91 effectors
  REGION 1..525: note = Description: MG91-446 effector
MTSQSFVIELQIAVDDAEMRTIVRKLEFARQLHNATLGTAMGQLQQMRQDAAWKEACVMPKGKERAAAFRALDRKYGLTEYDLHSVIARHREGSGRKAELGINETQKIATRVFQAINRFKLGLGGMPRFKSSKRGLHSIEGKTNKTGLKFRPEKKVLNWCGHDYRVLIDPKDDYIQRALKENERSDQYRKIKYCRLVRKRIRSSDRFFLQVVLEGTAPVKHVYAPVTERAAIDPGPQSIALFSKAFAGKIQVAGSNNFNEAASRRLLRAMDRSLRRNNPDAYNENGTIKKGAKLVKSKNYQRKVDRLREMHRVAAAERKCRHGQTINLLLSIAGDIRIEKNSWKAFQKGHFGKSLGKSAMSGFIAQLKSKAASAGLKVTEVNPYKLKLSQYDPYTDTYRKKDLSERWQEMKAGSGQYIQRDILSALLLYCADIEKEIHIPKVAVEQLEGAKQFLTDAGYVVLKSTSSRDQRDPRLAPEPKAMTPEMARQKILRGAGDSHLPTDQALGRIRAGEKVSTWSKETFPL

SEQ ID NO: 3255 - protein, 525 aa, unidentified
  REGION 1..525: note = Description of Unknown: uncultivated organism sequence
  REGION 1..525: note = Category: MG91 effectors
  REGION 1..525: note = Description: MG91-447 effector
MTSQSFVIELQIAVDDAEMRTIVRKLEFARQLHNATLGTAMGQLQQMRQDAAWKEACVMPKGKERAAAFRALDRKYGLTEYDLHSVIARHREGSGRKAELGINETQKIATRVFQAINRYKLGLGGMPRFKSSKRGLHSIEGKTNKTGLKFRPEKKVLNWCGHDYRVLIDPKDDYIQRALKENERSDQYRKIKYCRLVRKRIRSSDRFFLQVVLEGTAPVKHVYAPVTERAAIDPGPQSIALFSKAFAGKIQVAGSNNFNEAASRRLLRAMDRSLRRNNPDAYNENGTIKKGAKLVKSKNYQRKVDRLREMHRVAAAERKCRHGQTINLLLSIAGDIRIEKNSWKAFQKGHFGKSLGKSAMSGFIAQLKSKAASAGLKVTEVNPYKLKLSQYDPYTDTYRKKDLSERWQEMKAGSGQYIQRDILSALLLYCADIEKEIHIPKVAVEQLEGAKQFLTDAGYVVLKSTSSRDQRDPRLAPEPKAMTPEMARQKILRGAGDSHLPTDQALGRIRAGEKVSTWSKETFPL

SEQ ID NO: 3256 - protein, 525 aa, unidentified
  REGION 1..525: note = Description of Unknown: uncultivated organism sequence
  REGION 1..525: note = Category: MG91 effectors
  REGION 1..525: note = Description: MG91-448 effector
MTSQSFVIELPIAVDDAEMRTIVRKLEFARQLHNATLGTAMGQLQQMRQDAAWKEACVMPKGKERAAAFRALDRKYGLTEYDLHSVIARHREGSGRKAELGINETQKIATRVFQAINRYKLGLGGMPRFKSSKRGLHSIEGKTNKTGLKFRPEKKVLNWCGHDYRVLIDPKDDYIQRALKENERSDKYRKIKYCRLVRKRIRSADRFFLQVVLEGTAPVKHVYAPVTERAAIDPGPQSIALFSKAFAGKIQVAGPNNFNEAASRRLLRAMDRSLKRNNPDAYNEDGTIKKGAKLVKSKNYQRKVDRLREMHRVSAAERRCLHGQTINLLLSIAGDIRIEKNSWKAFQRGHFGKSLGKSAMSGFIAQLKSKAESAGLKVTEVNPYKLKLSQYDPYTDTYRKKALSERWQEMKAGSGQYIQRDVLSALLLYCADIEKEIHIPKAAVEQLEGAKQLLTDAGYVVLKSTSSRDQRDPRLAPEPKAMTPEMARQKILRGAGDSHLPTDQALGRIRAGEKVSTWSKETFPL

SEQ ID NO: 3257 - protein, 537 aa, unidentified
  REGION 1..537: note = Description of Unknown: uncultivated organism sequence
  REGION 1..537: note = Category: MG91 effectors
  REGION 1..537: note = Description: MG91-449 effector
MSTKSFIISLPIITGDQDRRRLRKSFSFGCNLQNAVMGGGWDRVLQMRATPEWQATRAMPKGRERTKAFRDLRVRFRLSEYDFHADVAMHRKASGRGHLLGINECQKLASRAWISVERHLYNGGSPRFISSRRGLHSIEGKTNRTGIIWKADQQCVTVCKHVYRVRVDKRDDWLTRALQDPTDPTKPRKVKYCRIVREMRKGKERFLLQLVAEGTSPLKHAYAGKDLRMAIDPGLGSLTYATEDGTIAKVQIAPSADTDHRAIRRIQRAMERSRRATNPDNYEAVDVVRHGKKKKSFKVKSGRLQWRFSKRYESLRAELAEIFRLSAATRKREHGEVCNWLLGHAGSIIVEDNSFKAFQKGHFGKSIGRHAPAAFYTQLTSKAESAGLQVTVVSPRKLKPSQHNLLTDTFVKHELWERRVRLGNDDDDRWIDRDAAACLNLLYADLEKQTYAPERIREAVLAGVTAWLDAGVVVIQAREGITEREFGRFRRRGIPSLTVQGLRQQGFRGRSDSKSGTTPRRKASTVSKPSHFSGEVV

SEQ ID NO: 3258 - protein, 530 aa, unidentified
  REGION 1..530: note = Description of Unknown: uncultivated organism sequence
  REGION 1..530: note = Category: MG91 effectors
  REGION 1..530: note = Description: MG91-450 effector
MTYQSFVIELPIAVDDAEMRTIVRKLEFARQLHNATLGTAIGQLQQMRQDTAWKQACAMPKGKERTAAFRALDRKYGLTEYDLHSVIARHREGSGRKAELGINETQKIATRVFQAINRYKLGLGGMPRFKSSKRGLHSIEGKTNKTGLKFRPEKKVLNWCGHDYRVLIDPKDDYIQRALKENERSDQYRKIKYCRLVRKRIRSADRFFLQVVLEGTAPVKHVYSPVTERAAIDPGPQSIALFSKAFAGKIQVAGSNNFNEAASRRLLRAMDRSLRRNNPDAYNEDGTINKGAKLAKSKNYQRKVDQLHEMHRVAAAQRKCRHGQTINLLLSIAGDIRIEKNSWKAFQRGHFGKSLGKSAMSGFIAQLKSKAESAGLKVTEVNPYKLKLSQYDPYTDTYRKKDLSERWQEMKAGSGQYIQRDVLSALLLYCADIEKEIHIPKVAVEQLEGAKQLLTDAGYVVLKSTSSRDQRDPRLAPEPKAMTPEMARQKILRGAGDSHLPTDQALGRIRAGGKVSTWSKETFPLQRGVV

SEQ ID NO: 3259 - protein, 537 aa, unidentified
  REGION 1..537: note = Description of Unknown: uncultivated organism sequence
  REGION 1..537: note = Category: MG91 effectors
  REGION 1..537: note = Description: MG91-451 effector
MSTKSFIISLPIITGDQDRRRLRKSFSFGCNLQNAVMGGGWDRVLQMRATPEWQATRAMPKGRERTKAFRDLRVRFRLSEYDFHADVAKHRKASGRGHLLGINECQKLASRAWISVERHLYNGGSPRFISSRRGLHSIEGKTNRTGIIWKADQQCVTVCKHVYRVRVDKRDDWLTRALQDPTDPTKPRKVKYCRIVREMRKGKERFLLQLVAEGTSPLKHAYAGKDLRMAIDPGLGSLTYATEDGTIAKVQIAPSADTDHRAIRRIQRAMERSRRATNPDNYEAVDVVRHGKKKKSFKVKSGRLQWRFSKRYESLRAELAEIFRLSAATRKREHGEVCNWLLGHAGHIIVEDNSYKAFQRGRFGKTIGRHAPAAFYTQLTSKAESAGLQVTVVSPRKLKPSQHNLLTDTFVKHELWERRVRLGNDDDDRWIDRDAAACLNLLYADLEKQTYAPERIREAVLAGVTAWLDAGVVVIQAREGITEREFGRFRRRGIPSSTVQGLRQQGFRGRSDSKSGATPRRKASTVSKPSHFSGEVV

SEQ ID NO: 3260 - protein, 514 aa, unidentified
  REGION 1..514: note = Description of Unknown: uncultivated organism sequence
  REGION 1..514: note = Category: MG91 effectors
  REGION 1..514: note = Description: MG91-452 effector
MRAKNSKDDVNSAVMTTPTFVLELPVKLGQGELAEVRKRFNYARNLYNATVGTALGQLQQMRQDPQWRQACSMSKGKERTTTFRRLDEKYRLREYDLHAIIAKHREASGRKHDLGINEAQKLATRVYEVVTKYKLGLGGKPRFKTQSRGLHSISGKTNKTGLRFKPEKSRLYWNSLEMFVEIDRKDRYIFEALHVDNDPSRFKRIKYCSLVRKVINGKERYYLQLSLEGQAPIKHIYAPQTERLAIDPAPKAITVFHKEKVFKASIEVSVHAEKQKKLQKQMSRSLQLNNPDAFDENGTLKKGARLQVKSKSYLKKQTKLCEVYRRAAAARKNLHGQVSNLLLSLAGEIVLEKNSWKALQRGHFGKSLGKSGMGAFERTLISKAERAGCKVHLVAPYILKPSQYDPFKDAFEKIPLKQRWRRMDDKELIQRDMLSAVLLYCADLANERHNRTEIFQTLEGAKQLLSDGGFVVKENPTSNPALDPRFAPERKAQAIEEVRREILCGCKGQLNANR

SEQ ID NO: 3261 - protein, 497 aa, unidentified
  REGION 1..497: note = Description of Unknown: uncultivated organism sequence
  REGION 1..497: note = Category: MG91 effectors
  REGION 1..497: note = Description: MG91-453 effector
MTSPTFIIELPIRVSDSESRTILRKLEFARQLHNATLGTALGQLQQLRQDSEWEKACLMPKGKERSELFRKLDRKYQLTEYDLHTVIAKHRQRSGRKTELGINETQKIATRVFQAVNRYKLGLGGRPRFKSLSRGLRSIEGKSNKTGLKFNIEKSVLSWCKHDYRVFIDPQDDYLQRALRSEDRGGFKKIKYCRLVRKTIKGKNRFYLQVVLEGQAPIKHVYASSSERLSIDPGPQTIAVFSEVWAGKIKVSPTAQVDEKRLRCIQRSMDRSLRKSNPDCYESDGTLKKGCVLKKTKGYEKRIQRLQECHRKAAATRRCEHGQLINLLLSMAGDIRVEKNQWKAFQRGHFGKSLGKSGISGFIERLKSKAESAGLKVTEVRPYKLKLSQYDPYTDQYRKKSLNERWHSLGEGSEWIQRDVMSALLLQCADLEEEKHIPTEVIKTLEGVKQFLRDAGYVILKPSSNGESNPAFASEPKAVTPEKVRLEIFCGASDSYL

SEQ ID NO: 3262 - protein, 530 aa, unidentified
  REGION 1..530: note = Description of Unknown: uncultivated organism sequence
  REGION 1..530: note = Category: MG91 effectors
  REGION 1..530: note = Description: MG91-454 effector
MTSQSFVIELPIAVDDAEMRTIVRKLEFARQLHNATLGTAIGQLQQMRQDTAWKQACAMPKGKERTAAFRALDRKYGLTEYDLHSVIARHREGSGRKAELGINETQKIATRVFQAINRYKLGLGGMPRFKSSKRGLHSIEGKTNKTGLKFRPGKKVLNWCGHDYRVLIDPKDDYIQRALKENERSDQYRKIKYCRLVRKRIRSADRFFLQVVLEGTAPVKHVYAPVTERAAIDPGPQSIALFSKAFAGKIQVAGSNNFNEAASRRLLRAMDRSLRRHNPDAYNEDGTINKGAKLAKSKNYQRKVDQLHEMHRVAAAQRKCRHGQTINLLLSIAGDIRIEKNSWKAFQRGHFGKSLGKSAMSGFIAQLKSKAESAGLKVTEVNPYKLKLSQYDPYTDTYRKKDLSERWQEMKAGSGQYIQRDVLSALLLYCADIEKEIHIPKVAVEQLEGAKQLLTDAGYVVLKSTSSRDQRDPRLAPEPKAMTPEMARQKILRGAGDSHLPTDQALGRIRAGGKVSTWSKETFPLQRGVV

SEQ ID NO: 3263 - protein, 497 aa, unidentified
  REGION 1..497: note = Description of Unknown: uncultivated organism sequence
  REGION 1..497: note = Category: MG91 effectors
  REGION 1..497: note = Description: MG91-455 effector
MTSPTFIIELPIRVSDSESRTILRKLEFARQLHNATLGTALGQLQQLRQDSEWEKACLMPKGKERSELFRKLDRKYQLTEYDLHAVIAKHRRASGRKAELGINETQKIATRVFQAVNRYKLGLGGRPRFKSLSRGLRSIEGKSNKTGLKFNIEKFVLSWCKHDYRVFIDPQDDYLQRALRSEGRSGFKKVKYCRLVRKIIKGKNRFYLQVVLEGKAPIKHIYASTNERLSIDPGPQTIAVFSNVWTGKIKVSPNAQIDEKKIRRIQRSMDRSLRKSNPDCYESDGTLKKGCVLKKTKGYEKRIQRLQECHRKAAATRRCEHGQLINLLLSMAGDIRVEKNQWKAFQRGHFGKSLGKSGISGFIERLKSKAESAGLKVTEVRPYKLKLSQYDPYTDQYRKKSLNERWHSLGEGSEWIQRDVMSALLLQCADLEEEKHIPTEVIKTLEGVKQFLRDAGYVILKPSSNGESNPAFASEPKAVTPEKVRLEIFCGTSDSYL

SEQ ID NO: 3264 - protein, 498 aa, unidentified
  REGION 1..498: note = Description of Unknown: uncultivated organism sequence
  REGION 1..498: note = Category: MG91 effectors
  REGION 1..498: note = Description: MG91-456 effector
MSGPTFIIELPIRVSDSESQTILRKLEFARQLHNATLGSALGQLQQLRQDSDWKKACSMPKGKERTSLFKLLDRKYHLTEYDLHAVIAKHRQASGRKTELGINEAQKIATRVFQAVNRYKLGLGGRPRFKSAKRGLRSIEGKTNKTGLKFNIEKSVLSWCKHDYRVIINPKDDYIRRAFLKEDGSKGFKTIKYCRLVRKTIKGKNRFYLQVVLEGYAPVKHIYASTEERLSIDPGPQTIAVFSKMWSGKIKVAPHAQVDEQRIRNLQRSMDRSLRQNNPDCYERNGVFKKGSELSRTKSYEKRVQNLKEYHRKASATRRCEHGQLINLLLSVAGEIRIEKNSWKAFQRGHFGKSLGKSGISGFIEQLKSKAESASLKVVEVKPYKLKLSQYDPYTETYEKKALNERWHRLGRSSEWIQRDVMSALLLQCADIENDKHIPTEVIKTLEGAKQLLRDAGYVILKPSSNGDNCQPFASEPKAVTPEKVRLEIFCGTDDSHL

SEQ ID NO: 3265 - protein, 537 aa, unidentified
  REGION 1..537: note = Description of Unknown: uncultivated organism sequence
  REGION 1..537: note = Category: MG91 effectors
  REGION 1..537: note = Description: MG91-457 effector
MSTKSFIISLPIITGGQDRRRLRKSFSFGCNLQNAVMGGGWDRVLQMRATAEWQATRAMPKGRERTKAFRDLRVRFRLSEYDFHADVAKHRKASGRGHLLGINECQKLASRAWISVERHLYNGGSPRFISSRRGLHSIEGKTNRTGIIWKADQQCVTVCKHVYRVRVDKRDDWLTRALQDPTDPTKPRKVKYCRIVREMRKGKERFFLQLVAEGSSPLKHAYAGKDLRMAIDPGLGSLTYATEDGTIAKVQIAPSADTDHRAVRKLQRAMERSRQATNPDNYEAVDVVRHGKKKKSFKVKSGRLQWRFSKRYKSLRAELAEIFRLSAATRKREHGEVCNWLLGHAGHIIVEDNSYKAFQRGRFGKTIGRHAPAALYAQLTNKAESAGLLVEVVSPKKLKPTQHNLLTGQFVKHELWERRVRLGEDDDERWIDRDAAACLNLLYADIENQTYAPERIREAVLAGVTAWLDAGVVVIQAREGITEREFGRFRRRGIPSLTVQGLRQQGFRGRSDSKSGATPRRKASTVSKPSHFSGEVV

SEQ ID NO: 3266 - protein, 530 aa, unidentified
  REGION 1..530: note = Description of Unknown: uncultivated organism sequence
  REGION 1..530: note = Category: MG91 effectors
  REGION 1..530: note = Description: MG91-458 effector
MTSLSFVIELPIAVDDAEMRTIVRKLEFARQLHNATLGTAMGQLQQMRQDAAWKEACVMPKGKERAAAFRALDRKYGLTEYDLHSVIARHREGSGRKAELGINETQKIATRVFQAINRYKLGLGGMPRFKSSKRGLHSIEGKTNKTGLKFRPEKKVLNWCGHDYRVLINPKDDYIQRALKENERSDKYRKIKYCRLVRKRIRSADRFFLQVVLEGTAPVKHVYAPVTERAAIDPGPQSIALFSKAFAGKIQVAGSNNFNEAASRRLLRAMDRSLRRNNPDAYNEDGTIKKGAKLVKSKNYQRKVDRLREMHRVAAAERKCRHGQTINLLLSIAGDIRIEKNSWKAFQRGHFGKSLGKSAMSGFIAQLKSKAASAGLKVTEVNPYKLKLSQYDPYTDTYRKKDLSERWQEMKAGSGQYIQRDVLPALLLYCADIEKEIHIPKVAVEQLEGAKQLLTDAGYVVLKSTSSRDQRDPRLAPEPKAMTPEMARQKILRGAGDSHLPTDQALGRIRAGGKVSTWSKETFPLQRGVV

SEQ ID NO: 3267 - protein, 352 aa, unidentified
  REGION 1..352: note = Description of Unknown: uncultivated organism sequence
  REGION 1..352: note = Category: MG91 effectors
  REGION 1..352: note = Description: MG91-459 effector
MSKKTVSARVNTNIPAEVPQDVRPRFLSVQNYRLLLAVTRFSTDYAQGVVRINNMQEMNCQELKTPEVLESTACQGECKKKFTRNNAKSLFCVVDKSVDLDDVARRWSKFRFMCKDCSDQYIFTEPYHVVQLYPSVGLDNIKVLCDEGFITKYVFPIKLECTEVVTQTEVPNYHDFYKVVKSIVKDKKPHEQITKLQLLTYGRVLFTETDYDCVMKSTVDPYGEMATELEFYPQHSSMMAFLPTYKDTKPLTYIYRVVKQVYSSNYDNYVVYFPIKCTLYCKLCKDNKIYLKVHPVLYCSQCGFTDALFFRKSTVMANTMFFKECVKSKTQKPRRIIYYDMVLYKTMVKKLK

SEQ ID NO: 3268 - protein, 376 aa, unidentified
  REGION 1..376: note = Description of Unknown: uncultivated organism sequence
  REGION 1..376: note = Category: MG91 effectors
  REGION 1..376: note = Description: MG91-460 effector
MMKKVTTTTTTSAAIKKKVSAKVNTNREDDSLKDLRGRFLSNQNYQLMKYVLRFATAYAQGTLRVNDLKEMNCDDLKYGEVTTSACCQGECGKKFNGAKILFCVIDSEDGAGDIEDKFKLVCHFCSNDYSYQKRYEVMQLYPTVSLPVVERLCEVGFITKYIFPIELDYTVTTTRTEVCNFHNFYKMVKSIIREKKSNEHITEIRLSTYGRDLFVETDDNCIMKNGINEYSEHFYELDFPSSPSTMLPFVQTYKETKLLTYFYTVTKRVYYSFFDYVVHFPIKCTRFCKLCKEDKLYLKTHPVLYCSKCGFTDAAFFKNAPFLKTTVFLAKCVKAKTLSPTRIYYYDMNEYKSYINKPPPSAAGAKNAGKKTNKKK

SEQ ID NO: 3269 - protein, 388 aa, unidentified
  REGION 1..388: note = Description of Unknown: uncultivated organism sequence
  REGION 1..388: note = Category: MG91 effectors
  REGION 1..388: note = Description: MG91-461 effector
MKKTTTTTVISSSKKKVSAKVNTNRRDDDDSKFKDLRGRFLSNQNFQLMKYVLRFATNYVQGTYFVNDLKEMECTDLKYGEVERRTVCQGGCGKKFTGGNKLLFCVIDNNGTDVDDEQYEKFKVVCHVCSNDYAYKRRYEVMQLFPTVSLSVVERLCEVGFITKYIFPIDLEYTVTETRTEVCNYHNFYKMVKSIIREKKTNEHITEIKLSTYGRDLFIETDENCAMRNGQNEYNEHVYELEFHPSPSTMIPFVQTYAEKKPLTYFYTVTKRVYLSFFDYAVCFPIKCINYCKMCKQDKLYFKINPVLYCSKCGFTDASFFKNAPFLKNTVFLAKCVKAKTLPPTRIYYYDMNLYKSYMNKASLSSSPTASKNKLFDFKPKALKFGKI

SEQ ID NO: 3270 - protein, 388 aa, unidentified
  REGION 1..388: note = Description of Unknown: uncultivated organism sequence
  REGION 1..388: note = Category: MG91 effectors
  REGION 1..388: note = Description: MG91-462 effector
MKKTTTTTVISSSKKKVSAKVNTNRRDDDDSKFKDLRGRFLSNQNFQLMKYVLRFATNYVQGTYFVNDLKEMECTDLKYGEVERRTVCQGGCGKKFTGGNKLLFCVIDNNGDDVDDGQYEKFKVVCHVCSNDYAYKRRYEVMQLFPTVSLSVVERLCEVGFITKYIFPIDLEYTVTETRTEVCNYHNFYKMVKSIIREKKTNEHITEIKLSTYGRDLFIETDENCAMRNGQNEYNEHVYELEFHPSPSTMIPFVQTYAEKKPLTYFYTVTKRVYLSFFDYAVCFPIKCINYCKMCKQDKLYFKINPVLYCSKCGFTDASFFKNAPFLKNTVFLAKCVKAKTLPPTRIYYYDMNLYKSYMNKASLSSSPTASKNKLFDFKPKALKFGKI

SEQ ID NO: 3271 - protein, 389 aa, unidentified
  REGION 1..389: note = Description of Unknown: uncultivated organism sequence
  REGION 1..389: note = Category: MG91 effectors
  REGION 1..389: note = Description: MG91-463 effector
MKKTTTTTVISSSKKKVSAKVNTNRDDDDSKFKDLRGRFLSNQNFQLMKYVLRFATNYVQGTYLVNDLKEMECTDLKYGEVERRTVCQGGCGKKFTGGNKLLFCVIDNNGDDDDVDDGGNEKFKVVCHVCSNDYAYKRRYEVMQLFPTVSLSVVERLCEVGFITKYIFPIDLEYTVTETRTEVCNYHNFYKMVKSIIREKKTNEHITEIKLSTYGRDLFIETDDNCAMRNGQNEYNEHVYELEFHPSPSTMIPFVQTYAEKKPLTYFYTVTKRVYLSFFDYAVCFPIKCINYCKMCKQDKLYFKINPVLYCSKCGFTDASFFKNAPFLKNTVFLAKCVKAKTLPPTRIYYYDMNLYKSYMNKASLSSSPTASKNKLFDFKPKALKFGKI

SEQ ID NO: 3272 - protein, 353 aa, unidentified
  REGION 1..353: note = Description of Unknown: uncultivated organism sequence
  REGION 1..353: note = Category: MG91 effectors
  REGION 1..353: note = Description: MG91-464 effector
MKKSVSIKVPAKVNTNIGDEKPKDLRNRFLSTQNYRLLSAVSRFATDYVQGVLRVNDLVEMKCNELKGQDLVDSAVCQGECRKKFSKGAKYLFCVVDSAADVNDVTQRWNKFKLVCNTCSNDYAFNAQYEVMQLYPTVSLADVERMCEVGFLTKYIFPIKLEYTESRTETEVPGYHNFYKIVKSIVKDKKHNEQISKIQLCTYGRDLFTETDYDCAMKSGVDAYGDMTFELEFYPRDSNMMAFLETYKDTKPLTYFYRVTKRIYSSRFDYVVYFPIKCTRYCKFCKASKIYAKNNPVLYCSQCGFTDAMFFKNSPLLSSVTFYDECVKSKTLKPKRIFYYDMALYKTMSKKLK

SEQ ID NO: 3273 - protein, 497 aa, unidentified
  REGION 1..497: note = Description of Unknown: uncultivated organism sequence
  REGION 1..497: note = Category: MG91 effectors
  REGION 1..497: note = Description: MG91-465 effector
MTSPTFIIELPIRVSDSESRTILRKLEFARQLHNATLGTALGQLQQLRQDSEWEKACLMPKGKERSELFRKLDRKYQLTEYDLHTVIAKHRQRSGRKTELGINETQKIATRVFQAVNRYKLGLGGRPRFKSLSRGLRSIEGKSNKTGLKFNIEKSVLSWCKHDYRVFIDPQDDFLQRALRSEGRSGFKKVKYCRLVRKTIKGKNRFYLQVVLEGQAPIKHIYASTSERLSIDPGPQTIAVFSDVWAGKIKVSPTAQVDEKRLRCIQRSMDRSLRKSNPDCYESDGTLRKGCVLKKTKGYEKRIQRLQECHRKAAATRRCEHGQLINLLLSMAGDIRVEKNQWKAFQRGHFGKSLGKSGISGFIERLKSKAESAGLKVTEVKPYKLKLSQYDPYTDQYRKKSLNERWHSLGESSEWIQRDVMSALLLQCADLEEEKHIPTEVIKTLEGVKQLLRDAGYVILKPSSNGESNPTFASEPKAVTPEKVRLEIFCGASDSYL

SEQ ID NO: 3274 - protein, 497 aa, unidentified
  REGION 1..497: note = Description of Unknown: uncultivated organism sequence
  REGION 1..497: note = Category: MG91 effectors
  REGION 1..497: note = Description: MG91-466 effector
MPSPTFIIELPIRVSDSESRTILRKLEFARQLHNATLGTALGKLQQLRQDSEWKRACLMPKGKERSELFRKLDRKYQLSEYDLHAVIANHRQSSGRKAELGINETQKIATRVFQAVNRYKLGLGGRPRFKSLSRGLRSIEGKSNKTGLKFNIEKSVLSWCKHDYRVFIDPQDDYLQRALRSEGRSGFKKVKYCRLVRKTIKGKNRFYLQVVLEGQAPIKHIYASTNERLSIDPGPQTIAVFSNVWAGKIKVSPNAQIDEKKIRRIQRSMDRSLRKSNPDCYESDGTLKKDCVLKKTKGCEKRIQRLQECHRKVAATRQCEHGELINLLLSVAGDIRVEKNQWKAFQRGHFGKSLGKSGISGFIERLKSKAESAGLKVTEVKPYKLKLSQYDPYTDQYRKKSLNERWHSLGESSEWIQRDVMSALLLQCADLEEEKHIPTEVIKTLEGAKQLLRDAGYVILKPSSNGESNPTFASEPKAVTPEKVRLEIFCGTSDSYL

SEQ ID NO: 3275 - protein, 530 aa, unidentified
  REGION 1..530: note = Description of Unknown: uncultivated organism sequence
  REGION 1..530: note = Category: MG91 effectors
  REGION 1..530: note = Description: MG91-467 effector
MTSQSFVIELPIAVDDAEMRTIVRKLEFARQLHNATLGTAMGQLQQMRQDAAWKEACVMPKGKERAAAFRALDRKYGLTEYDLHSVIARHREGSGRKAELGINETQKIATRVFQAINRYKLGLGGMPRFKSSKRGLHSIEGKTNKTGLKFRPEKKVLNWCGHDYRVLIDPKDDYIQRALKENERSDKYRKIKYCRLVRKRIRSADRFFLQVVLEGTAPVKHVYAPVTERAAIDPGPQSIALFSKAFAGKIQVAVSNNFNEAASRRLLRAMDRSLRRNNPDAYNEDGTIKKGAKLVKSKNYQRKVDRLREMHRVAAAERKCRHGQTINLLLSIAGDIRIEKNSWKAFQRGHFGKSLGKSAMSGFIAQLKSKAASAGLKVTEVTPYKLKLSQYDPYTDTYRKKDLSERWQEMKAGSGQYIQRDILSALLLYCADIEKEIHIPKVAVEQLEGAKQFLTDAGYVVLKSTSSRDQRDLRLAPEPKAMTPEMARQKILRGAGDSHLPTDQALGRIRAGGKVSTWSKETFPLQRGVV

SEQ ID NO: 3276 - protein, 349 aa, unidentified
  REGION 1..349: note = Description of Unknown: uncultivated organism sequence
  REGION 1..349: note = Category: MG91 effectors
  REGION 1..349: note = Description: MG91-468 effector
MKKSAIAKVNTNKSDESPKDLRSRFLSTQNYRLLSAVSRFATDYVQGILRVNDLAEMRCQELKGRELLESTSCQGECRKKFSKSAKYLYCIIDSAVNVNDPSQRWNKFKFVCNSCSNDFAFNAQYEVIQLFPTVSLEDVERLCAVGFLTKYIFPIKLEYTESKTETEVPNYHNFYKIVRSIVKDKKHNEQIIKIQLSTYGRDLFIETDHNCTMRSGVDAYGDVTFDLEFYPRDSNMMSFLSTYKDTKPLTYFYRVTKRIYTSRFDYVVYFPIKCTRYCKLCKDSKIYMKTNPVLYCSQCGFTDAMFFQNSIMLSSVMFIDECVKSKTLKPKRIFYYDMALYKNIIKKLK

SEQ ID NO: 3277 - protein, 530 aa, unidentified
  REGION 1..530: note = Description of Unknown: uncultivated organism sequence
  REGION 1..530: note = Category: MG91 effectors
  REGION 1..530: note = Description: MG91-469 effector
MTSQSFVIELPIAVDDAEMRTIVRKLEFARQLHNATLGTALGQLQQMRQDTAWKQACAMPKGKERAAAFRALDRKYGLTEYDLHSVIARHREGTSRKAELGINETQKIATRVFQAINRYKLGLGGMPRFKSSKRGLHSIEGKTNKTGLKFRPEKKVLNWCGHDYRVLIDPKDDYIQRALKENERSDKYRKIKYCRLVRKRIRSADRFFLQVVLEGTAPVKHVYAPVTERAAIDPGPQSIALFSKAFAGKIQVAGSNNFNEAASRRLLRAMDRSLRRNNPDAYNEDGTIKKGAKLVKSKNYQRKVDRLREMHRVAAAERKCRHGQTINLLLSIAGDIRIEKNSWKAFQRGHFGKSLGKSAMSGFIAQLKSKAASAGLKVTEVNPYKLKLSQYDPYTDTYRKKDLSERWQEMKAGSGQYIQRDILSALLLYCADIEKEIHIPKVAVEQLEGAKQFLTDAGYVVLKSTSSRDQRDLRLAPEPKAMTPEMARQKILRGAGDSHLPTDQALGRIRAGGKVSTWSKETFPLQRGVV

SEQ ID NO: 3278 - protein, 537 aa, unidentified
  REGION 1..537: note = Description of Unknown: uncultivated organism sequence
  REGION 1..537: note = Category: MG91 effectors
  REGION 1..537: note = Description: MG91-470 effector
MSTKSFIISLPIITGGQDRRRLRKSFSFGCNLQNAVMGGGWDCVLKMRATPEWQAARAMPKGSERTKAFRDLRMRFRLSEYDFHADVAKHRKASGRGHLLGINECQKLASRAWISVERHLYNGGSPRFISSRRGLHSIEGKTNRTGIIWKADQQCVTVCKHVYRVRVDKRDDWLTRALQDPTDPKKPRKVKYCRIVREMRKGKECYFLQLVAEGTSPLKHAYAGKDLRMAIDPGLGSLTYATEDGTIAKVQIAPSADTDHRAVRKLQRAMERSRQATNPDNYETVEVVRHGKKHKSLKVKSGRLQWRFSKRSENLRAELAEIFRLSAATRKREHGEVCNWLLGHAGHIIVEDNSYKAFQRGRFGKTIGRHAPAALYAQLTNKAESAGLLVEVVSPKKLKPTQHNLLTGQFVKHELWERRVRLGEDDDERWIDRDAAACLNLLYADIENQTYAPERIREAVLAGVTAWLDAGVVVIQAREGITEREFGRFRRRGIPSLTVQGLRQQGFRGRSDSKSGATPRRKASTVSKPSHFSGEVV

SEQ ID NO: 3279 - protein, 537 aa, unidentified
  REGION 1..537: note = Description of Unknown: uncultivated organism sequence
  REGION 1..537: note = Category: MG91 effectors
  REGION 1..537: note = Description: MG91-471 effector
MSTKSFIISLPIITGDQDRRRLRKSFSFGCNLQNAVMGGGWDRVLKMRATAEWQTARAMPKSSERTKAFRDLRVRFRLSEYDFHADVAKHRKASGRGHLLGINECQKLASRAWISVERHLYNGGSPRFISSRRGLHSIEGKTNRTGIIWKADQQCVTVCKHVYRVRVDKCDDWLTRALQDPTDPTKPRKVKYCRIVREMRKGKERFLLQLVAEGTSPLKHAYAGKDLRMAIDPGLGSLTYATEDGTIAKVQIAPSADTDHRAIRRIQRAMERSRRATNPDNYEAVDVVRHGKKKKSFKVKSGRLQWRFSKRYESLRAELAEIFRLSAATRKREHGEVCNWLLGHAGHIIVEDNSYKAFQRGRFGKTIGRHAPAALYAQLTNKAESAGLLVEVVSPKKLKPTQHNLLTGQFVKHELWERRVRLGEDDDERWIDRDAAACLNLLYADIENQTYAPERIREAVLAGVTAWLDAGVVVIQAREGITEREFGRFRRRGIPSLTVQGLRQQGFRGRSDSKSGATPRRKASTVSKPSHFSGEVV

SEQ ID NO: 3280 - protein, 530 aa, unidentified
  REGION 1..530: note = Description of Unknown: uncultivated organism sequence
  REGION 1..530: note = Category: MG91 effectors
  REGION 1..530: note = Description: MG91-472 effector
MPSQSFVIELPIAVDDAEMRTIVRKLEFARQLHNATLGTAMGQLQQMRQDAAWKEACVMPKGKERAAAFRALDRKYGLTEYDLHSVIARHREGSGRKAELGINETQKIATRVFQAINRYKLGLGGMPRFKSSKRGLHSIEGKTNKTGLKFRPEKKVLNWCGHDYRVLIDPKDDYIQRALKENERSDKYRKIKYCRLVRKRIRSSDRFFWQVVLEGTAPVKHVYAPVTERAAIDPGPQSIALFSKAFAGKIQVAGSNNFNEAASRRLLRAMDRSLRRNNPDAYNENGTIKKGAKLVKSKNYQRKVDRLREMHRVAAAERKCRHGQTINLLLSIAGDIRIEKNSWKAFQRGHFGKSLGKSAMSGFIAQLKSKAASAGLKVTEVNPYKLRLSQYDPYTDTYRKKDLSERWQEMKAGSGLYIQRDVLSALLLYCADIEKEIHIPKVAVEQLEGAKQFLTDAGYVVLKSTSSRDQRDPRLASEPKAMTPEMSRQKILRGAGDSHLPTDQALGRIRAGGKVSTWSKETFPLQRGVV

SEQ ID NO: 3281 - protein, 497 aa, unidentified
  REGION 1..497: note = Description of Unknown: uncultivated organism sequence
  REGION 1..497: note = Category: MG91 effectors
  REGION 1..497: note = Description: MG91-473 effector
MTSPTFIIELPICVSDSESRTILRKLEFARQLHNATLGTALGQLQQLRQDSEWEKACLMPKGKERSELFIKLDRKYQLTEYDLHTVIAKHRQRSGRKTELGINETQKIATRVFQAVNRYKLGLGGRPRFKSLSRGLRSIEGKSNKTGLKFNIEKSVLSWCKHDYRVFIDPQDDYLQRALRSEGRSGFKKVKYCRLVRKTIKGKNRFYLQVVLEGQAPIKHIYASTNERLSIDPGPQTIAVFSDVWAGKIKVSPTAQVDEKRLRCIQRSMDRSLRKSNPDCYESDGTLRKGCVLKKTKGYEKRIQRLQECHRKAAATRRCEHGQLINLLLSMAGDIRVEKNQWKAFQRGHFGKSLGKSGISGFIERLKSKAESAGLKVTEVKPYKLKLSQYDPYTDQYRKKSLNERWHSLGESSEWIQRDVMSALLLQCADLEEEKHIPTEVIKTLEGVKQLLRDAGYVILKPSSNGESNPTFASEPKAVTPEKVRLEIFCGASDSYL

SEQ ID NO: 3282 - protein, 583 aa, unidentified
  REGION 1..583: note = Description of Unknown: uncultivated organism sequence
  REGION 1..583: note = Category: MG91 effectors
  REGION 1..583: note = Description: MG91-474 effector
MLTKDLKQEALKRGFLHSGVNDSIEAYRTRNLTIYDFVCEESAVVRVCISKQHAGIYDVLSNIWKDCMLENYLEDPNQFANYMLSECAKKLLKTDSLFFDSKASFAIDAQIRKAKNWKKINQKENREKEIKKIMAGTNKPVPSGFKIFSEKLLCSAKRIMYSAKEKSLYCPECGNTFQLPDVPKKGSLHTCPACGYSTKVSSAQYLNDIHWSCIVQAAGKRSIIRYFCNELFIEYGKCSTILYEKYRTIVEEDGSMVPLMQTSEGWKDYKGKNYSYFYTVPKREVPNDMYLYGTVEALMKMPALKNSMLDVWVKQHIGADKKLCSEYLVENYIKVYAQTTIYEKLLKHGLNKIAHEAAFYYDSSFHKNEEKVDKFLNLTKGNLDRLREFIPDPSGSNVSAMRYLEKYNVYLKDDELKTFLRLEVSDNMKEQIVKFCKCKKVTLCKINKYVTENANADWSSYFDYIGWTEELDYKKSDSVYYPKKFFKTHDRVFKELEEKKDAIQRKKDKEISKKIADLWEQRMQIPQYHYENNDLFVMMPHGTSDLKKEGRSLNHCVAGYKEFVAEEKTQIFFKQLRKNRSIH

SEQ ID NO: 3283 - protein, 537 aa, unidentified
  REGION 1..537: note = Description of Unknown: uncultivated organism sequence
  REGION 1..537: note = Category: MG91 effectors
  REGION 1..537: note = Description: MG91-475 effector
MSTKSFIISLPIITGDQDRRRLRKSFSFGCNLQNAVMGGGWDRVLKMRATPEWQTARAMPKSSERTKAFRDLRVRFRLSEYDFHADVAMHRKASGRGHLLGINECQKLASRAWISVERHLYNGGSPRFISSRRGLHSIEGKTNRTGIIWKADQQCVTVCKHVYRVRVDKRDDWLTRALQDPTDPTKPRKVKYCRIVREMRKGKERFLLQLVAEGTSPLKHAYAGKDLRMAIDPGLGSLTYATEDGTIAKVQIAPSADTDHRAVRKLQRAMERSRQATNPDNYETVEVVRHGKKHKSLKVKSGRLQWRFSKRYEKLRSELAEMLRLCAATRKREHGEVCNWLLGHAGHIIVEDNSYKAFQRGRFGKTIGRHAPAALYAQLTNKAESAGLLVEVVSPKKLKPSQHNLLTDTFVKHELWERRVRLGNDDDDRWIDRDAAACLNLLYADLEKQTYAPERIREAVPAGVTAWLDAGVVVIQAREGITEREFGRFRRRGIPSLTVQGLRQQGFRGRSDSKSGTTPRRKASTESKPSHFSGEVV

SEQ ID NO: 3284 - protein, 530 aa, unidentified
  REGION 1..530: note = Description of Unknown: uncultivated organism sequence
  REGION 1..530: note = Category: MG91 effectors
  REGION 1..530: note = Description: MG91-476 effector
MTSQSFVIELPIAVDDAEMRTIVRKLEFARQLHNATLGTAMGQLQQMRQDAAWKEACVMPKGKERAAAFRALDRKYGLTEYDLHSVIAGHREGSGRKAELGINETQKIATRVFQAINRYKLGLGGMPRFKSSKRGLHSIEGKTNKTGLKFRPEKKVLNWCGHDYRVLIDPKDDYIQRALKENERSDKYRKIKYCRLVRKRIRSSDRFFLQVVLEGTAPVKHVYAPVTERAAIDPGPQSIALFSKEFAGKIQVAGSNNFNEAVSRRLLRAMDRSLRRNNPDAYNENGTIKKGAKLVKSKNYQRKVDRLREMHRVAAAERKCRHGQTINLLLSIAGDIRIEKNSWKAFQRGHFGKSLGKSAMSGFIAQLKSKAASAGLKVTEVNPYKLKLSQYDPYTDTYRKKDLSERWQEMKAGSGQYIQRDVLSALLLYCADIEKEIHIPKVAVEQLEGAKQFLTDAGYVVLKSTSSRDQRDPRLASEPKAMTPEMARQKIFRGAGDSHLPTDQELGQIRAGGKVSTWSKETFPLQRGVV

SEQ ID NO: 3285 - protein, 525 aa, unidentified
  REGION 1..525: note = Description of Unknown: uncultivated organism sequence
  REGION 1..525: note = Category: MG91 effectors
  REGION 1..525: note = Description: MG91-477 effector
MTSQSFVIELPIALDDAEMRTIVRKLEFARQLHNATLGTAMGQLQQMRQDAAWKEACVMPKGKERAAAFRALDRKYGLTEYDLHSVIARHREGTGRKAELGINETQKIATRVFQAINRYKLGLGGMPRFKSSKRGLHSIEGKTNKTGLKFRPEKKVLNWCGHDYRVLIDPKDDYIQRALKENERSDKYRKIKYCRLVRKRIRSADRFFLQVVLEGTAPVKHVYAPVTERAAIDPGPQSIALFSKAFAGKIQVAGSNNFNEAASRRLLRAMDRSLRRSNPDAYNEDGTIKKGAKLVKSKNYQRKVDRLREMHRVAAAERKCRHGQTINLLLSIAGDIRIEKNSWKAFQRGHFGKSLGKSAMSGFIAQLKSKAASAGLKVKEVNPYKLKLSQYDPYTDTYRKKDLSERWQEMKAGSGQYIQRDILSALLLYCADIEKEIHIPKVAVEQLEGAKQFLTDAGYVVLKSTSSRDQRDLRLAPEPKAMTPEMARQKILRGAGDSHLPTDQALGRIRAGGKVSTWSKETFPL

SEQ ID NO: 3286 - protein, 530 aa, unidentified
  REGION 1..530: note = Description of Unknown: uncultivated organism sequence
  REGION 1..530: note = Category: MG91 effectors
  REGION 1..530: note = Description: MG91-478 effector
MTSQSFVIELPIAVDDAEMRTIVRKLEFARQLHNATLGTAMGQLQQMRQDAAWKEACVMPKGKERAAAFRALDRKYGLTEYDLHSVIARHREGSGRKAELGINETQKIATRVFQAINRYKLGLGGMPRFKSSKLGLHSIEGKTNKTGLKFRPEKKVLNWCGHDYRVLIDPKDDYIQRALKENERSDKYRKIKYCRLVRKRIRSSDRFFLQVVLEGTAPVKHVYAPVTERAAIDPGPQSIALFSKAFAGKIQVAGSNNFNEAASRRLLRAMDRSLRRNNPDAYNEDGTINKGAKLAKSKNYQRKVDQLHEMHRVAAAQRKCRHGQTINLLLSIAGDIRIEKNSWKAFQRGHFGKSLGKSAMSGFIAQLKSKAASAGLKVTEVNPYKLKLSQYDPYTDTYRKKDLSERWQEMKAGSGQYIQRDVLSALLLYCADIEKEIHIPKVAVEQLEGAKQLLTDAGYVVLKSTSSRDQRDPRLAPEPKAMTPEMARQKILRGAGDSHLPTDQALGRIRAGGKVSTWSKETFPLQRGVV

SEQ ID NO: 3287 - protein, 511 aa, unidentified
  REGION 1..511: note = Description of Unknown: uncultivated organism sequence
  REGION 1..511: note = Category: MG91 effectors
  REGION 1..511: note = Description: MG91-479 effector
MKKKSTNENFIMELPLTVEKFQYNELDKRFELMRRIYNTAQNKLKRQYEYLSSFKAYKDCKTKKEKGDFLESHPFSFKGILNKKGEPLKITFREYDLKSYLSQFTKEKVDSQYTYSDFGINSHMLMHMGMAIWSSWKKVLYDPKAQEVSFKKYGELQSIGVDWKQKKQYGMFLDLGKGIIKLNINGRQKSQARYLTMKIKFGHKERQVWYEGDALKAGEDSIKALTIVRRKIRDKYNYFLQMTIRNNKPQKGRTLGTGRVAIDLGTCKVAVVTKDSVRLIPLAPSISSYSKELRVIQRQMERSRRANNPKKYHKDGTVKKDNRDKWVTSKEYIRLRDIKAELERKQAAVRKQDHIALANELLSLGNEFVIEDNDVQEWAKRKKEEKKREKDGKNLSKAGLGKQIGNHSPATFVTILKNKVESLGGSFTEVDTDNGATDYDFINNEFTRHELEERYITLSDGKRHQRDTLAAFNLYHIDTTQNRVYDRLAMQRHYAWFCEKETEAVKKYKRL

SEQ ID NO: 3288 - protein, 537 aa, unidentified
  REGION 1..537: note = Description of Unknown: uncultivated organism sequence
  REGION 1..537: note = Category: MG91 effectors
  REGION 1..537: note = Description: MG91-480 effector
MSTKSFIISLPIITGGQDRRRLRKSFSFGCNLQNAVMGGGWDRVLQMRATAEWQATRAMPKGRERTKAFRDLRVRFRLSEYDFHADVAKHRKASGRGHLLGINECQKLASRAWISVERHLYNGGSPRFISSRRGLHSIEGKTNRTGIIWKADQQCVTVCKHVYRVRVDKRDDWLTRALQDPTDPKKPRKVKYCRIVREMRKGKERFLLQLVAEGTSPLKHAYAGKDLRMAIDPGLGSLTYATEDGTIAKVQIAPSADTDHRAIRRIQRAMERSRRATNPDNYEAVDVVRHGKKKKSFKVKSGRLQWRFSKRYESLRAELAEIFRLSAATRKREHGEVCNWLLGHAGHIIVEDNSYKAFQRGRFGKTIGRHAPAALYAQLTNKAESAGLLVEVVSPKKLKPTQHNLLTGQFVKHELWERRVRLGEDDDERWIDRDAAACLNLLYADIENQTYAPERIREAVLAGVTAWLDAGVVVIQAREGITEREFGRFRRRGIPSLTVQGLRQQGFRGRSDSKSGATPRRKASTVSKPSHFSGEVV

SEQ ID NO: 3289 - protein, 530 aa, unidentified
  REGION 1..530: note = Description of Unknown: uncultivated organism sequence
  REGION 1..530: note = Category: MG91 effectors
  REGION 1..530: note = Description: MG91-481 effector
MTSPSFVIELPIAVDDAEMRTIVRKLEFARQLHNATLGTAMGQLQLMRQDAAWKEACVMPKGKERAAAFRALDRKYGLTEYDLHSVIARHREGTGRKAELGINETQKIATRVFQAINRYKLGLGGMPRFKSFKRGLHSIEGKTNKTGLKFKPEQKVLNWCGHDYRVLIDPKDDYIQRALKDNERSDQYRKIKYCRLVRRRIRSADRFFLQVVLEGTAPVKHVYAPVTERAAIDPGPQSIALFSKEFAGKIQVAGSNNFNEAVSRRLLRAMDRSLRRNNPDAYNENGTIKKGAKLVKSKNYQRKVDRLREMHRVAAAERKCRHGQTINLLLSIAGDIRIEKNSWKAFQRGHFGKSLGKSAMSGFIAQLKSKAASAGLKVTEVNPYKLRLSQYDPYTDTYRKKDLSERWQEMKAGSGLYIQRDVLSALLLYCANIEKEIHIPKVAVEQLEGAKQFLTDAGYVVLKSTSSRDQRDPRLASEPKAMTPEMARQKIFRGAGDSHLPTDQELGQIRAGGKVSTWSKETFPLQRGVV

SEQ ID NO: 3290 - protein, 1352 aa, unidentified
  REGION 1..1352: note = Description of Unknown: uncultivated organism sequence
  REGION 1..1352: note = Category: MG91 effectors
  REGION 1..1352: note = Description: MG91-482 effector
MTAFKYYLGLDMGTNSVGWAATDPEYRLLKAKGKDLWGIREFNEASGAVERRTHRISRRRRQREQVRIGILKDYFHDAICEVDPSFFQRLENSKYHEEDKDVEVRYKNNIFNDSNYTDKDYFNEYPTIYHLRNELISSTEKHDVRLVFLALLNMFKHRGHFLNAGLGENNGESNIDNVYFELTELLSELTEYHLSQDIDCKQIEAILSRRDMSRTHKAEELAGVLHVDLKNKPYKELIRGLCGLKFNACVVFPDVQSEEVTKLDICLSESTFDEKSDEIANIIGEDYFEIIMAMKEMFDIGSLASIMKGHNYLSQARVASYTKHKEDLKLLKEVIKKYCGKKEYDKFFNSDADGSYASYVGSYNSKNKERRVGNKRTSEELYKEIKKLLKDAQKEDENVQKILTSIENETFLPKQLTASNGVIPNQVHAREMKKILSNAENYLPFLTEKDETGLSVSERILKLFTFQIPYYVGPTSENSGKNGGNGWVVRREDGQVLPWNIDEKIDMKATSEAFISRMVRRCTYISGEQVLPKASLEYQSYCVLNEINNIKIDGERISVELKQDIYKAVFQKGKKVTKKQLCKYLHTRGIIETEEQVTGVDVSINNALTTYGKFKPIFGEDISKDSVQKMIEDIVFWCTVYGDSKKFLKDRIEEKYGNKLSEEQIKRILGFKFKDWGNLSKKFLELNGADTSTGESISIIRALWNNNLNLMELINSSLYNYKECLAEYQNTMLKTLSEIEAEDLNEYYFSAPVRRMIWQTILVIKELVKVLGCEPERIFVEMTRRPDEHKTRTSSRRNKFEELYKKVKDETTDWMQVIANAEEDGKIRSKKMYLYLTQKGRCMYTGKHIELDDLFDNNLYDIDHIYPRHFVKDDNIDNNLVLVCKEKNAHKSDHYPIEEEIFLSQKKMWLELRKSGFITEEKYNRLMDRNPFSDEQKAGFIARQLVETSQGTKGVANILRQLLPGSKIVYAKASNVSEFRCTRDDIPKSRLVNDFHHAHDAYLNIVVGNVYYVKFTQNPLNFIKKDYDKYKEDYNLSKMFDWDVKRNGEVAWIAQRKDGAAGTITTVKRMLSRNTPLMTRYSFDGKGGLTNETLYSAKKAKGEGYIPFKSSDDKMQDVTKYGGFTSVTGAYFFLVEHTEKKKRIRTIESVPVYLAQKIEQNPDELKKYCEEILGLIDADIRLKKIKIGSLIKRNGYFCYITGKTGNRLIVRNAVNLCLKNEWIKYISKLEKVKEKDAVDKIITKEKNEVLYSELIQKFKHGIFSKRPNPVGDKLEKDSEKFNNLSIKDQCAVLCQVLRMAAILGSECDMTLLGDSPNCGKMLISKKIGDEEIYLINQSVTGLYEKKINLHTV

SEQ ID NO: 3291 - protein, 530 aa, unidentified
  REGION 1..530: note = Description of Unknown: uncultivated organism sequence
  REGION 1..530: note = Category: MG91 effectors
  REGION 1..530: note = Description: MG91-483 effector
MTSQSFVIELPIAVDDAEMRTIVRKLEFARQLHNATLGTAMGQLQQMRQDAAWKEACVMPKGKERAAAFRALDRKYGLTEYDLHSVIARHREGSGRKAELGINETQKIATRVFQAINRYKLGLGGMPRFKSSKRGLHSIEGKTNKTGLKFRPEKKVLNWCGHDYRVLIDPKDDYIQRALKENERSDKYRKIKYCRLVRKRIRSSDRFFLQVVLEGTAPVKHVYAPVTERAAIDPGPQSIALFSKAFAGKIQVAGSNNFNEAASRRLLRAMDRSLRRNNPDAYNEDGTINKGVKLAKSKNYQRKVDQLHEMHRVAAVQRKCRHGQTINLLLSIAGDIRIEKNSWKAFQRGHFGKSLGKSAMSGFIAQLKSKAASAGLKVTEVNPYKLKLSQYDPYTDTYRKKDLSERWQEMKAGSGLYIQRDILSALLLYCADIEKEIHIPKVAVEQLEGAKQFLTDAGYVVLKSTSSRDQRDPRLASEPKAMTPEMARQKILRGAGDSHLPTDQELGRIRAGGKVSTWSKETFPLQRGVV

SEQ ID NO: 3292 - protein, 525 aa, unidentified
  REGION 1..525: note = Description of Unknown: uncultivated organism sequence
  REGION 1..525: note = Category: MG91 effectors
  REGION 1..525: note = Description: MG91-484 effector
MTSQSFVIELPIAVDDAEMRTIVRKLEFARQLHNATLGTAMGQLQQMRQDAAWKEACVMPKGKERAAAFRALDRKYGLTEYDLHSVIARHREGSGRKAELGINETQKIATRVFQAINRYKLGLGGMPRFKSSKRGLHSIEGKTNKTGLKFRPEKKVLNWCGHDYRVLIDPKDDYIQRALKENERSDKYRKIKYCRLVRKRIRSADRFFLQVVLEGTAPVKHVYAPVTERAAIDPGPQSIALFSKAFAGKIQVAGSSNFNEAASRRLLRAMDRSLRRNNPDAYNEDGTIKKGAKLVKSKNYQRKVDRLREMHRVAAAERKCRHGQTINLLLSIAGDIRIEKNSWKAFQRGHFGKSLGKSAMSGFIAQLKSKAASAGLKVTEVNPYKLKLSQYDPYTDTYRKKDLSERWQEMKAGSGQYIQRDILSALLLYCADIEKEIHIPKVAVEQLEGAKQFLTDAEYVVLKSTSSRDQRDLRLAPEPKAMTPEMARQKILRGAGDSHLPTDQALGRIRAGGKVSTWSKETFPL

SEQ ID NO: 3293 - protein, 530 aa, unidentified
  REGION 1..530: note = Description of Unknown: uncultivated organism sequence
  REGION 1..530: note = Category: MG91 effectors
  REGION 1..530: note = Description: MG91-485 effector
MPSQSFVIELPIAVDDAEMRTIVRKLEFARQLHNATLGTAIGQLQQMRQDTAWKQACAMPKGKERTAAFRALDRKYGLTEYDLHSVIARHREGSGRKAELGINETQKIATRVFQAINRYKLGLGGMPRFKSSKRGLHSIEGKTNKTGLKFRPEKKVLNWCGHDYRVLIDPKDDYIQRALKENERSDKYRKIKYCRLVRKRIRSSDRFFLQVVLEGTAPVKHVYAPVTERAAIDPGPQSIALFSKEFAGKIQVAGSNNFNEAASRRLLRAMDRSLRRNNPDAYNENGTIKKGAKLVKSKNYQRKVDRLREMHRVAAAERKCRHGQTINLLLSIAGDIRIEKNSWKAFQRGHFGKSLGKSAMSGFIAQLKSKAASAGLKVTEVNPYKLRLSQYDPYTDTYRKKDLSERWQEMKAGSGLYIQRDVLSALLLYCADIEKEIHIPKVAVEQLEGAKQFLTDAGYVVLKSTSSRDQRDPRLASEPKAMTPEMARQKILRGAGDSHLPTDQELGQIRAGGKVSTWSKETFPLQRGVV

SEQ ID NO: 3294 - protein, 537 aa, unidentified
  REGION 1..537: note = Description of Unknown: uncultivated organism sequence
  REGION 1..537: note = Category: MG91 effectors
  REGION 1..537: note = Description: MG91-486 effector
MSTKSFIISLPIITGDQDRRRLQKSFSFGCNLQNAVMGGGWDRVLKMRATAEWQTARAMPKSSERTKAFRDLRVHFRLSEYDFHADVAKHRKASGRGHLLGINEGQKLASRAWISVERHLYNGGSPRFISSRRGLHSIEGKTNRTGIIWKADQQCVTVCKHVYRVRVDKRDDWLTRALQDPTDPTRPRKVKYCRIVREMRKGKERFLLQLVAEGTSPLKHAYAGKDLRMAIDPGLGSLTYATEDGTIAKVQIAPSADTDHRAVRKLQRAMERSRQATNPDNYETVEVVRHGKKHKSLKVKSGRLQWRFSKRYESLRAELAEIFRLSAATRKREHGEVCNWLLGHAGHIIVEDNSYKAFQKGHFGKSIGRHAPAAFYTQLTSKAESAGLQVTVVSPRKLKPSQHNLLTDTFVKHELWERRVRLGNDDDDRWIDRDAAACLNLLYADLEKQTYVPERIREAVLAGVTAWLDAGVVVIQAREGITEREFGRFRRRGIPSLTVQGLRQQGFRGRSDSKSGATPRRKASTVSKPSHLSGEVV

SEQ ID NO: 3295 - protein, 524 aa, unidentified
  REGION 1..524: note = Description of Unknown: uncultivated organism sequence
  REGION 1..524: note = Category: MG91 effectors
  REGION 1..524: note = Description: MG91-487 effector
MTSQTFILELPIKADDSQSRTIAKKFEYGRMLYNATLGSGLGRLTQMRQDPEWRRACEMSKGKERNELFRRLNRKYRLTEYDFHADIARHREGTKRKSELGINEAQKLATQAFSAVSRYMYKQGGRPRFKSFKRGLHSLEGKTNKTGLKFRPEKMLLDWCRKSYQVMLDSDDAFILDALYADKERTHFKRIKYNRIVCRNIKGVKRFYLQVVLEGTPPVKHAYAPATERMAIDPGPKSFAVFCPRVQAKVQVAPGAKVNEKAIRRIQRSMDRSLRASNPKAFDEKGRIKSGVGLTYSKGYQARVDKLREAHRRAAGTRKCEHGELANLLLECAGNIRIEKNSWEAFKRSHFGRSINNSAASGFIQRLKSKAERAGLTVEEVSPYRLKPSQYDPYKDEFMKKALGERWMYLGDETTVIQRDIMSAILIYFADLKNQTHNPEVVKAALEGLKRGLTDAGYVKQLKLPRSSGSQDPLFAPEPKALTTEELRSKCFRAGSDRHSSTLNGTDGKAVGWSETFPLQRGVV

SEQ ID NO: 3296 - protein, 525 aa, unidentified
  REGION 1..525: note = Description of Unknown: uncultivated organism sequence
  REGION 1..525: note = Category: MG91 effectors
  REGION 1..525: note = Description: MG91-488 effector
MTSQSFVIELPIAVDDAEMRTIVRKLEFARQLHNATLGTAMGQLQQMRQDAAWKEACVMPKGKERAAAFRALDRKYGLTEYDLHSVIARHREGSGRKAELGINEAQKIATRVFQAINRYKLGLGGMPRFKSSKRGLHSIEGKTNKTGLKFRPEKKVLNWCGHDYRVLIDPKDDYIQRALKENERSDKYRKIKYCRLVRKRIRSADRFFLQVVLEGTAPVKHVYAPVTERAAIDPGPQSIALFSKAFAGKIQVAGPNNFNEAASRRLLRAMDRSLKRNNPDAYNEDGTIKKGAKLVKSKNYQRKVDRLREMHRVSAAERRCLHGQTINLLLSIAGDIRIEKNSWKAFQRGHFGKSLGKSAMSGFIAQLKSKAESAGLKVTEVNPYKLKLSQYDPYTDTYRKKALSERWQEMKAGSGQYIQRDVLSALLLYCADIEKEIHIPKAAVEQLEGAKQLLTDAGYVVLKSTSSRDQRDPRLAPEPKAMTPEMARQKILRGAGDSHLPTDQALGRIRAGEKVSTWSKETFPL

SEQ ID NO: 3297 - protein, 529 aa, unidentified
  REGION 1..529: note = Description of Unknown: uncultivated organism sequence
  REGION 1..529: note = Category: MG91 effectors
  REGION 1..529: note = Description: MG91-489 effector
MSQSYILSFELTLPQRIYPYLDKLFNVFKWEVRRTVGEIWNEDFFKRFKGRGSASAILKEILKKPPNIPSRVHRNILELSGEIVRSHIERKRIYDYLMEKPCRVLFDEDRIADELNASPLFVLNVQRQVRKILRKEKDKKSYFQVVKPSFNGEVVIFSADDSVENGQFKKLRFSRRYIEFEIKVPDGNSWKWIKVRKLISDRLKKFLTEAKRTCAPLIKKVYLKSGLSIYRLVIPLEFETRFSEGSLKVFSLDLSPSEKRLGVGVIVSPEGHSRPIFFNAEKMVKKLERILKEISNLEKKIDNIADEIHITGNREHKVRLEKRLKHLFAEQKLKWRKFKELRKQILEVFTKLILEYARAYDYSFIAVERLKFSSLPDWKNRRMRRLFSQWFYARFIERLRQKALRYGLRVLLINPYRTSRVCHKCGGEGKLEKLEFKCQCGTYDRDYNASVNIGKRALEKLVSGAKSEPYRGEDIPARFPFPQGTIHLKGKALLSILPLTLLLSYLRLVETSYLKLSRLSRYLQTDKYG

SEQ ID NO: 3298 - protein, 530 aa, unidentified
  REGION 1..530: note = Description of Unknown: uncultivated organism sequence
  REGION 1..530: note = Category: MG91 effectors
  REGION 1..530: note = Description: MG91-490 effector
MPSQSFVIELPIAVDDAEMRTIVRKLEFARQLHNATLGTAMGQLQQMRQDAAWKEACVMPKGKERAAAFRALDRKYGLTEYDLHSVIARHREGSGRKAELGINETQKIATRVFQAINRYKLGLGGMPRFKSSKRGLHSIEGKTNKTGLKFRPEKKVLNWCGHDYRVLIDPKDDYIQRALKENERSDKYRKIKYCRLVRKRIRSSDRFFLQVVLEGTAPVKHVYAPVTERAAIDPGPQSIALFSKEFAGKIQVAGSNNFNEAASRRLLRAMDRSLRRNNLDAYNENGTIKKGAKLVKSKNYQRKVDRLREMHRVAAAERKCRHGQTINLLLSIAGDIRIEKNSWKAFQRGHFGKSLGKSAMSGFIAQLKSKAASAGLKVTEVNPYKLRLSQYDPYTDTYRKKDLSERWQEMKAGSGLYIQRDVLSALLLYCADIEKEIHIPKVAVEQLEGAKQFLTDAGYVVLKSTSSRDQRDPRLASEPKAMTPEMARQKILRGAGDSHLPTDQELGQIRAGGKVSTWSKETFPLQRGVV

SEQ ID NO: 3299 - protein, 530 aa, unidentified
  REGION 1..530: note = Description of Unknown: uncultivated organism sequence
  REGION 1..530: note = Category: MG91 effectors
  REGION 1..530: note = Description: MG91-491 effector
MPSQSFVIELPIAVDDAEMRTIVRKLEFARQLHNATLGTAIGQLQQMRQDTAWKQACAMPKGKERTAAFRALDRKYGLTEYDLHSVIARHREGSGRKAELGINETQKIATRVFQAINRYKLGLGGMPRFKSSKRGLHSIEGKTNKTELKFRPEKKVLNWCGHDYRVLIDPKDDYIQRALKENERSDKYRKIKYCRLVRKRIRSSDRFFLQVVLEGTAPVKHVYAPVTERAAIDPGPQSIALFSKEFAGKIQVAGSNNFNEAASRRLLRAMDRSLRRNNPDAYNENGTIKKGAKLVKSKNYQRKVDRLREMHRVAAAERKCRHGQTINLLLSIAGDIRIEKNSWKAFQRGHFGKSLGKSAMSGFIAQLKSKAASAGLKVTEVNPYKLRLSQYDPYTDTYRKKDLSERWQEMKAGSGLYIQRDVLSALLLYCADIEKEIHIPKVAVEQLEGAKQFLTDAGYVVLKSTSSRDQRDPRLASEPKAMTPEMARQKILRGAGDSHLPTDQELGQIRAGGKVSTWSKETFPLQRGVV

SEQ ID NO: 3300 - protein, 530 aa, unidentified
  REGION 1..530: note = Description of Unknown: uncultivated organism sequence
  REGION 1..530: note = Category: MG91 effectors
  REGION 1..530: note = Description: MG91-492 effector
MPSQSFVIELPIAVDDAEMRTIVRKLEFARQLHNATLGTAMGQLQQMRQDAAWKEACVMPKGKERAAAFRALDRKYGLTEYDLHSVIARHREGSGRKAELGINETQKIATRVFQAINRYKLGLGGMPRFKSSKRGLHSIEGKTNKTGLKFRPEKKVLNWCGHDYRVLIDPKDDYIQRALKENERSDKYRKIKYCRLVRKRIRSSDRFFLQVVLEGTAPVKHVYAPVTKRAAIDPGPQSIALFSKEFAGKIQVAGSNNFNEAASRRLLRAMDRSLRRNNPDAYNENGTIKKGAKLVKSKNYQRKVDRLREMHRVAAAERKCRHGQTINLLLSIAGDIRIEKNSWKAFQRGHFGKSLGKSAMSGFIAQLKSKAASAGLKITEVNPYKLRLSQYDPYTDTYRKKDLSERWQEMKAGSGLYIQRDVLSALLLYCADIEKEIHIPKVAVEQLEGAKQFLTDAGYVVLKSTSSRDQRDPRLASEPKAMTPEMARQKILRGAGDSHLPTDQELGQIRAGGKVSTWSKETFPLQRGVV

SEQ ID NO: 3301 - protein, 530 aa, unidentified
  REGION 1..530: note = Description of Unknown: uncultivated organism sequence
  REGION 1..530: note = Category: MG91 effectors
  REGION 1..530: note = Description: MG91-493 effector
MTSQSFVIELPIAVDDAEMRTIVRKLEFARQLHNATLGTAMGQLQQMRQDAAWKEACVMPKGKERAAAFRALDRKYGLTEYDLHSVIARHREGSGRKAELGINETQKIATRVFQAINRYKLGLGGMPRFKSSKRGLHSIEGKTNKTGLKFRPEKKVLNWCGHDYRVLIDPKDDYIQRALKENERSDKYRKIKYCRLVRKRIRSADRFFLQVVLEGTAPVKHVYAPVTERAAIDPGPQSIALFSKAFAGKIQVAGPNNFNEAASRRLLRAMDRSLKRNNPDAYNEDGTIKKGAKLVKSKNYQRKVDRLREMHRVSAAERRCLHGQTINLLLSIAGDIRIEKNSWKAFQRGHFGKSLGKSAMSGFIAQLKSKAESAGLKVTEVNPYKLKLSQYDPYTDTYRKKALSERWQEMKAGSGQYIQRDILSALLLYCADIEEEIHIPKVAVEQLEGAKQFLTDAGYVVLKSTSSRDQRDPRLAPEPKAMTPEMARQKILRGAGDSHLPTDQALGRIRAGGKVSTWSKETFPLQRGVV

SEQ ID NO: 3302 - protein, 532 aa, unidentified
  REGION 1..532: note = Description of Unknown: uncultivated organism sequence
  REGION 1..532: note = Category: MG91 effectors
  REGION 1..532: note = Description: MG91-494 effector
MSTKSFIITLPIITGSEERRWLRKSFSFGCNLQNAVMGGGWDRVQQMRATPEWQAARVMPKGKERTQALRDLRIRFRLSEYDFHADVAQHRKASGRGHLLGINECQKIASRAWISVERHIYKGGSPRFISSKRGLHSVEGKTNKTGIIWKAEKSVFKFAGHTYRVRINKHDDWLTRALQDPTDPAKPRKVKYCRIVRNVRKGKECFDLQLIAEGTSPLKHAYAGKDLRMAIDPGLGSLTYATEDGKIAKVQIAPNADTDHRAVRKIQRAMERSRQATNPENYETVDVVRHGKKRKSLKVKSGRLQWRFSKHYEKLRAELAEIHRLAAATRKREHGEVCNWLLGHAGTIIVEDNSFKAFQRGRFGKSIGRYAPAAFYTQLTSKAESAGLQVKVVSPRKLKPTQHNLLTGRFVKHELWERRVQLGDRTGVCWIDRDAAACVNLLYADLDQQTYDPKRIREAVLAGVTAWLDAGVVVIQARERITEREFRRFRRRGIPSLAVQGLRQKGFRGRSDSKSGATPEEKSLGQIETFPL

SEQ ID NO: 3303 - protein, 530 aa, unidentified
  REGION 1..530: note = Description of Unknown: uncultivated organism sequence
  REGION 1..530: note = Category: MG91 effectors
  REGION 1..530: note = Description: MG91-495 effector
MTSLSFVIELPIAVDDAEMRTIVRKLEFARQLHNATLGTAMGQLQQMRQDAAWKEACVMPKGKERAAAFRALDRKYGLTEYDLHSVIARHREGSGRKAELGINETQKIATRVFQAIKRYKLGLGGMPRFKSSKRGLHSIEGKTNKTGLKFRPEKKVLNWCGHDYRVLINPKDDYIQRALKENERSDKYRKIKYCRLVRKRIRSADRFFLQVVLEGTAPVKHVYAPVTERAAIDPGPQSIALFSKAFAGKIQVAGSNNFNEAASRRLLRAMDRSLRRNNPDAYNEDGTIKKGAKLVKSKNYQRKVDRLREMHRVAAAERKCRHGQTINLLLSIAGDIRIEKNSWKAFQRGHFGKSLGKSAMSGFIAQLKSKAASAGLKVTEVNPYKLKLSQYDPYTDTYRKKDLSERWQEMKAGSGQYIQRDVLPALLLYCADIEKEIHIPKVAVEQLEGAKQLLTDAGYVVLKSTSSRDQRDPRLAPEPKAMTPEMARQKILRGAGDSHLPTDQALGRIRAGGKVSTWSKETFPLQRGVV

SEQ ID NO: 3304 - protein, 526 aa, unidentified
  REGION 1..526: note = Description of Unknown: uncultivated organism sequence
  REGION 1..526: note = Category: MG91 effectors
  REGION 1..526: note = Description: MG91-496 effector
MEEVFVLELPLQVEKYQADILNKRYEQLRQLYNYVQGKLLRQYRYFEQMVEFQACKTIREKRVFFRSHPFNINGKLAGNKELPEITFDEYGINGFVEKMAQKSVGTNMTYADLGFTTNILDHLSASIWSAWEKKLYDYRAKRITFKKYGELDSFSSRRKVVCGKVYFSGVELHLDTMELAIKINGKVGKDAKFITLPILHNPKHTDYEMWALKGGLDSIKVVKVVRRLVRGQYKYYLQLSIEGEKPQKGRTLGKGNVGIDIGPTTIAVSGENIASIDKLASKCDNIQEEITRLARKIDRSRRANNPENFNEDGTIKRGVRLVWNDSKRYKALRKEMAELQRRQAAIRKQQHIDRANVLLKEGDTFIVENNKISGWTRKAKETKVNEKTGKIQKKKRFGKSVANNAPAMFVTILENKVKSLGGEVVKVDTQNAASQYDFTNNSFEKHELKERSVTLSNGDTHQRDMLAAFNLQHLKYDAPEKKQYDTEAMAQHYDHFCELEKAEILRYKNKEKKDDRSTIGAGDLLD

SEQ ID NO: 3305 - protein, 537 aa, unidentified
  REGION 1..537: note = Description of Unknown: uncultivated organism sequence
  REGION 1..537: note = Category: MG91 effectors
  REGION 1..537: note = Description: MG91-497 effector
MSTKSFIISLPIITGDQDRRRLRKSFSFGCNLQNAVMGGGWDRVLKMRATAEWQTARAMPKSSERTKAFRDLRVRFRLSEYDFHADVAMHRKASGRGHLLGINECQKLASRAWISVERHLYNGGSPRFISSRRGLHSIEGKTNRTGIIWKADQQCVTVCKHVYRVRVDKRDDWLTRALQDPTDPTKPRKVKYCRIVREMRKGKERFLLQLVAEGTSPLKHAYAGKDLRMAIDPGLGSLTYATEDGTIAKVQIAPSADTDHRAVRKLQRAMERSRQATNPDNYETVEVVRHGKKHKSLKVKSGRLQWRFSKRYEKLRSELAEMLRLSAATRKREHGEVCNWLLGHAGHIIVEDNSYKAFQRGRFGKTIGRHAPAALYAQLTNKAESAGLLVEVVSPKKLKPSQHNLLTDTFVKHELWERRVRLGNDDDDRWIDRDAAACLNLLYADLEKQTYAPERIREAVLAGVTAWLDAGVVVIQAREGITEREFGRFRRRGIPSLTVQGLRQQGFRGRSDSKSGVTPRRKASTVSKPSHFSGEVV

SEQ ID NO: 3306 - protein, 532 aa, unidentified
  REGION 1..532: note = Description of Unknown: uncultivated organism sequence
  REGION 1..532: note = Category: MG91 effectors
  REGION 1..532: note = Description: MG91-498 effector
MSTKSFIITLPIITGSEERRWLRKSFSFGCNLQNAVMGGGWDRVQQMRATPEWQAARVMPKGKERTQAFRDLRIRFRLSEYDFHADVAQHRKASGRGHLLGINECQKIASRAWISVERHIYKGGSPRFISSKRGLHSVEGKTNKTGIIWKAEKSVFKFAGHTYRVRINKHDDWLTRALQDPTDPAKPRKVKYCRIVRNVRKGKECFDLQLIAEGTSPLKHAYAGKDLRMAIDPSLGSLTYATEDGKIAKVQIAPNADTDHRAVRRIQRAMERSRQATNPENYETVDVVRHGKKRKSLKVKSGRLQWRFSKHYEKLRAELAETHRLAAATRKREHGEVCNWLLGHAGTIIVEDNSFKAFQRGRFGKSIGRYAPAAFYTQLTSKAESAGLQVKVVSPRKLKPTQHNLLTGRVVKHELWERRVQLGDRTSVCWIDRDAAACVNLLYADLDQQTYDPKRIREAVLAGVTAWLDAGVVVIQAREGITEREFRRFRRRGIPSLAVQGLRQKGFRGRSDSKSGATPEEKSLGQIETFPL

SEQ ID NO: 3307 - protein, 537 aa, unidentified
  REGION 1..537: note = Description of Unknown: uncultivated organism sequence
  REGION 1..537: note = Category: MG91 effectors
  REGION 1..537: note = Description: MG91-499 effector
MSTKSFIISLPIITGDQDRRRLCKSFSFGCNLQNAVMGDGWDRVLKMRATPKWQAARAMPNGSERTKAFRDLRVRFRLSEYDFHADVAKHRKASGRIHLLDINECQELASRAWISVERHLYNGGSPRFISSRRGLHSIEWKTNRTGIIWKADQQCVTVSKHVYRIRVDKHDDWLTRALQDPTDPTKPRRVKYCRIVREMRKGKERFLLQLVAEGTSPLKHAYAGKDLRMAIDPGLGSLTYATEDGTIAKVQIAPSADTDQRAVRKLQRAMERSRQATNPDNYETVGVVRHGKKRKSLKVKAGRLQWRFSKRYEKLRSELAEMLRLSVATRKREHGEVCNWLLGHVGHIIVEDNSYKAFQRGRFGKTIGRHAPAALYAQLASKAECAGLLVEVVSPKKVKPTQYNLLTGQFVKHELWERRVRLGEDDDDRWIDRDAAACLNLLYADLEKQIYAPERIREAVPAGVTAWLDAGVVVIQAREGITEREFGRFRRRGIPSSTVQGLCQQGFRGRSDSKSGATPRRKASTVSKPSHFSGEVV

SEQ ID NO: 3308 - protein, 524 aa, unidentified
  REGION 1..524: note = Description of Unknown: uncultivated organism sequence
  REGION 1..524: note = Category: MG91 effectors
  REGION 1..524: note = Description: MG91-500 effector
MTSPSFILELPIKVNDSESRMILRKFEFARQLHNATLGSALGQLQQMRQDPQWKKACNLPKGKERSELFRNLDRQYRLTEYDLHTVIAKHRERSGRKDQLGINETQKIATRVYQSIRRYQLGLGGRPRFKSISRGLHSIEGKTNVTGLKFNLQKSVLSWCKHDYRVIIDAKDDYIQRALQKEDGTGYKKIKYCRLVRKTIKNRERFFLQVLLEGTAPVKHIYAPDSERLSIDPGPQAIAVFSEQFAGKIQIAPTAKVNEAVIRRMQRSMDRSLRQNNEEAYESNGTLKKGVKLKQTKSYKMRVAQLSDYHRRVAATRRCEHGQLANLLLSLAGDIRIEKNHWKAFQRGHFGKSLGKSGASSFIERLKSKAESAGLKVSEVKPYTLKLSQYDPYTETYRKKALSERWHQLGSSSEWIQRDVLSALLLQCADIEKEKHIPTKIIETLEGAKQLLRDAGYIVDKPSSNGDHCDRPFASEPKAQTPEEVRLEIFCGVGDSRLPLLLRNGSRQKANEKAHVRSKETFSL

SEQ ID NO: 3309 - protein, 639 aa, unidentified
  REGION 1..639: note = Description of Unknown: uncultivated organism sequence
  REGION 1..639: note = Category: MG91 effectors
  REGION 1..639: note = Description: MG91-501 effector
MLTKELRQEALKKGFHYPKVEKSVEFYRTKNLMIYDFVNENRISMLRVCIAEKKAGIYDTFTKTWADCLLSSFLGKAGISVSELLAFALSAEAKKRLSSGHDNFDYLALYKIDQQISYAKNWEKRHPADERKKEISQIMAGTNKRLSAGFIKFNLDLFGDCKRIMYSKSEKAVYCPECESISRISSPPKKGSLYRCPVCCFTAKVSQAENPLTEVHWSCIVQPAGKRSIIRYFCNDFSLQFGKCKIASEEKFRTILEADGSRIELMQTGNGWEDYKEKRYGLYYPSKRDVPYDMFLYGNVKAILKIPVYEHSMLDVWVKQHKNKKNELYTVYLIENYISQYAKNEIFEKLLKFGLNHIAHEAAFHNYNRTFNFNGNKIEDFLNIKMASLKQLRRIINDPFERDIIAMRYLDKNNLYLKDEELKKFLSLNVSNDMKEKIVRFCKFKKVTFYKVNNYVTENANADWSSYFDYIGWTEELEYKKSDSVYYPKKFFKTHDRVFKELEEKKDAIQRKKDKEISKKIAGLWEQRMQIPQYHYENNDLFVMMPHGTSDLKKEGRSLNHCVADYKEFVAEEKTQIFFISKKAAPQKSFYTLEIKNHEIEQCHGRNNVDMTEEIRSFAYGYLKQLNTLNEKAAVKAVA

SEQ ID NO: 3310 - protein, 532 aa, unidentified
  REGION 1..532: note = Description of Unknown: uncultivated organism sequence
  REGION 1..532: note = Category: MG91 effectors
  REGION 1..532: note = Description: MG91-502 effector
MSTKSFIINLPIITGDQDRRRLRKSFSFGCNLQNAVMGGGWDRVLWMRATPEWQAARVMPKGSERTKAFRDLRVQFRLSEYDFHADVAKHRKASGRSHLLGINESQKLASRAWISVERHLYNSGSPRFISSRRGLHSIEGKTNRTGIIWKADQQCVTVCKRVYRVRVDKRDDWLTRALQDPTDPKKPRKVKYCRIVREMRKGKERFLLQLVAEGTSPLKHAYAGKDQRMAIDPGLGSLTYATEDGKIAKVQIAPNADTDHRAVRRIQRAMERSRQATNPDNYETVDVVRHGKKRQSLKVKSGRLEWRFSKRYEKLRAELAQPHRLAAATRKREHGEVCNWLLGHAGTIIVEDNSFKAFQRGQFGKSIGRHAPAAFYTQLTSKAESAGLQVKVVSPKKLKPTQHNLLTGRFVKHELWERRVQLGDRTDVCWIDRDAAACVNLLYADLDQQIYDPKRIREAVLAGVTAWLDAGVVVIQAREGITEREFRRFRRRGIPSLAVQGLRQKGFRGRSDSKSGAIPEAKSLGYIETFPL

SEQ ID NO: 3311 - protein, 492 aa, unidentified
  REGION 1..492: note = Description of Unknown: uncultivated organism sequence
  REGION 1..492: note = Category: MG91 effectors
  REGION 1..492: note = Description: MG91-503 effector
MRATPKWQAARAMPNGSERTKAFRDLRVRFRLSEYDFHADVAKHRKASGRIHLLDINECQELASRAWISVERHLYNGGSPRFISSRRGLHSIEWKTNRTGIIWKADQQQCVTVSKHVYRIRVDKHDDWLTRALQDPTDPTKPRRVKYCRIVREMRKGKERFLLQLVAEGTSPLKHAYAGKDLRMAIDPGLGSLTYATEDGTIAKVQIAPSADTDHRAVRKLQRAMERSRQATNPDNYETVEVVRHGKKHKSLKVKSGRLQWRFSKRYEKLRSELAEMLRLSVATRKREHGEVCNWLLGHVGHIIVENNSYKAFQRGRFGKTIGRHAPAALYAQLASKAECAGLLVEVVSPKKVKPTQYNLLTGQFVKHELWERRVRLGEDDDDRWIDRDAAACLNLLYADLEKQIYAPERIREAVPAGVTAWLDAGVVVIQAREGITEREFGRFRRRGIPSSTVQGLRQQGFRGRSDSKSGATPRRKASTVSKPSHFSGEVV

SEQ ID NO: 3312 - protein, 530 aa, unidentified
  REGION 1..530: note = Description of Unknown: uncultivated organism sequence
  REGION 1..530: note = Category: MG91 effectors
  REGION 1..530: note = Description: MG91-504 effector
MTSQSFVIELPIAVDDAEMRTIVRKLEFARQLHNATLGTAMGQLQQMRQDAAWKEACVMPKGKERAAAFRALDRKYGLTEYDLHSVIARHREGSGRKAELGINETQKIATRVFQAINRYKLGLGGMPRFKSFKRGLHSIEGKTNKTGLKFKPEQTVLNWCGHDYRVLIDPKDDYVQRALKENERSDQYRKIKYCRLVRKRIRSSDRFFLQVVLEGTAPVKHVYAPVTERAAIDPGPQSIALFSKAFAGKIQVAGSNNFNEAASRCLLRAMDRSLRRNNPDAYNENGTIKKGAKLVKSKNYQRKVDRLREMHRVAAAERKCRHGQTINLLLSIAGDIRIEKNSWKAFQKGHFGKSLGKSAMSGFIAQLKSKAASAGLKVTEVNPYKLKLSQYDPYTDTYRKKDLSERWQEMKAGSGQYIQRDVLSALLLYCADIEKEIHIPKAAVEQLEGAKQLLTDAGYVVLKSTSSRDQRDPRLAPEPKAMTPEMARQKILRGAGDSHLPTDQALGRIRAGGKVSTWSKETFPLQRGVV

SEQ ID NO: 3313 - protein, 634 aa, unidentified
  REGION 1..634: note = Description of Unknown: uncultivated organism sequence
  REGION 1..634: note = Category: MG91 effectors
  REGION 1..634: note = Description: MG91-505 effector
MLTKDLKQEALKRGFLHSGVNDSIEAYRTRNLAIYDFVCEGSAVVRVCISKQHAGIYDVLNNIWKDCTLENYLEDPNQFANYMLSERAKKLLKTDSLFFDSKASFAIDVQIRKAKNWKKINQKENREKEIKKIMAGTNKPVPSGFKIFSERLLCSAKRIMYSAKEKSLYCPECGNTFQLPGVPKKGSVHTCPACGYRAKVSCVQYQLNDIHWSCIVQAAGKRSVIRYFCNELLLEYGKCSTIFYEKYRTIIEEDGSMVPLMQTSDGWNDYKAKNYSFFYTVPKREEPNDMYLYGTVDALMKMPVLKNSMLDVWVKQHIGADKKLCSEYLVENYIKIYAKTTIYEKLLKCGLNKIAHEAAFYYDSSFHREEKKVDKFLNLTKENLNRLREFIPDPSGSNVSAMRYLEKYNVYLKDDELKTFLRLEVSDNMKEQIIKFCKCKKVTLYKINKYVTENANADWSSYFDYIGWTEELDYKKSDSVYYPKKFFKTHDRVFKELEEKKDAIQRKKDKEISKKIADLWEQRMQIPQYHYENNDLFVMMPHDTSDLKKEGRSLNHCVAGYKEFVAEEKTQIFFIRKKADPQKSFYTLEIKNHDIEQCHGKNNVNMTEEIRTFAYGFLNQLNTIKEKPAVRAAA

SEQ ID NO: 3314 - protein, 530 aa, unidentified
  REGION 1..530: note = Description of Unknown: uncultivated organism sequence
  REGION 1..530: note = Category: MG91 effectors
  REGION 1..530: note = Description: MG91-506 effector
MTSQSFVIELPIAVDDAEMRTIVRKLEFARQLHNATLGTAIGQLQQMRQDTAWKQACAMPKGKERTAAFRALDRKYGLTEYDLHSVIARHREGSGRKAELGINETQKIATRVFQAINRYKLGLGGMPRFKSSKRGLHSIEGKTNKTGLKFRQEKKVLNWCGHDYRVLIDPKDNYVQRALKENERSDQYRKIKYCRLVRKRIRSADRFFLQVVIEGTAPVKHVYAPVTERAAIDPGPQSITLFSKAFAGKIQVAGSNNFNEAASRRLLRAMDRSLRRNNPDAYNEDGTINKGAKLAKSKNYQRKVDQLHEMHRVAAAQRKCRHGQTINLLLSIAGDIRIEKNSWKAFQRGHFGKSLGKSAMSGFIAQLKSKAASAGLKVTEVNPYKLKLSQYDPYTDTYRKKDLSERWQEMKAGSGQYIQRDVLSALLLYCADIEKEIHIPKVAVEQLEGAKQLLTDAGYVVLKSTSSRDQRDPRLAPEPKAMTPEMARQKILRGAGDSHLPTDQALGRIRAGGKVSTWSKETFPLQRGVV

SEQ ID NO: 3315 - protein, 530 aa, unidentified
  REGION 1..530: note = Description of Unknown: uncultivated organism sequence
  REGION 1..530: note = Category: MG91 effectors
  REGION 1..530: note = Description: MG91-507 effector
MPSQSFVIELPIAVDEAEMRTIVRKLEFARQLHNATLGTAMGQLQQMRQDAAWKEACVMPKGKERAAAFRALDRKYGLTEYDLHSVIARHREGSGRKAELGINETQKIATRVFQAINRYKLGLGGMPRFKSSKRGLHSIEGKTNKTGLKFRPEKKVLNWCGHDYRVLIDPKDDYIQRALKENERSDKYRKIKYCRLVRKRIRSSDRFFLQVVLEGTAPVKHVYAPVTERAAIDPGPQSIALFSKEFAGKIQVAGSNNFNEAASRRLLRAMDRSLRRNNPDAYNENGTIKKGAKLVKSKNYQRKVDRLREMHRVAAAERKCRHGQTINLLLSIAGDIRIEKNSWKAFQRGHFGKSLGKSAMSGFIAQLKSKAASAGLKVTEVNPYKLRLSQYDPYTDTYRKKDLSERWQEMKAGSGLYIQRDVLSALLLYCADIEKEIHIPKVAVEQLEGAKQFLTDAGYVVLKSTSSRDQRDPRLASEPKAMTPEMARQKILRGAGDSHLPTDQELGQIRAGGKVSTWSKETFPLQRGVV

SEQ ID NO: 3316 - protein, 497 aa, unidentified
  REGION 1..497: note = Description of Unknown: uncultivated organism sequence
  REGION 1..497: note = Category: MG91 effectors
  REGION 1..497: note = Description: MG91-508 effector
MTSPTFIIELPIRVSDSESRTILRKLEFARQLHNATLGTALGQLQQLRQDSEWEKACLMPKGKERSELFRKLDRKYQLTEYDLHTVIAKHRQRSGRKTELGINETQKIATRVFQAVNRYKLGLGGRPRFKSLSRGLRSIEGKSNKTGLKFNIEKSVLSWCKHDYRVFIDPQDDFLQRALRSEGRSGFKKVKYCRLVRKTIKGKNRFYLQVVLEGQAPIKHIYASTSERLSIDPGPQTIAVFSDVWAGKIKVSPTAQVDEKRLRCIQRSMDRSLRKSNPDCYESDGTLRKGCVLKKTKGYEKRIQRFQECHRKAAATRRCEHGQLINLLLSMAGDIRVEKNQWKAFQRGHFGKSLGKSGISGFIERLKSKAESAGLKVTEVKPYKLKLSQYDPYTDQYRKKSLNERWHSLGESSEWIQRDVMSALLLQCADLEEEKHIPTEVIKTLEGVKQLLRDAGYVILKPSSNGESNPTFASEPKAVTPEKVRLEIFCGASDSYL

SEQ ID NO: 3317 - protein, 537 aa, unidentified
  REGION 1..537: note = Description of Unknown: uncultivated organism sequence
  REGION 1..537: note = Category: MG91 effectors
  REGION 1..537: note = Description: MG91-509 effector
MSTKSFIINLPIITGDQDRRRLRKSFSFGCNLQNAVMGGGWDRVLRMRATPEWQAARVMPKGSERTKAFRDLRVRFRLSEYDFHADVAKHRKASGRGHLLGINECQKLASRAWISVERHLYNGGSPRFISSRRGLHSIEGKTNRTGIIWKADQQCVTVCKRVYRVRVDKRDDWLTRALQDPTDPTKPRKVKYCRIVREMRKGKERFLLQLVAEGTSPLKHAYAGKDLRMAIDPGLGSLTYATEDGTIAKVQIAPSADTDHRAIRRIQRAMERSRRATNPDNYEAVDVVRHGKKKKSFKVKSGRLQWRFSKRYESLRAELAEIFRLSAATRKREHGEVCNWLLGHAGSIIVEDNSFKAFQKGHFGKSIGRHAPAAFYTQLTSKAESAGLQVTVVSPRKLKPSQHNLLTDTFVKHELWERRVRLGNDDDDRWIDRDAAACLNLLYADLEKQTYAPERIREAVLAGVTAWLDAGVVVIQAREGITEREFGRFRRRGIPSLTVQGLRQQGFRGRSDSKSGTTPRRKASTESKPSHFSGEVV

SEQ ID NO: 3318 - protein, 537 aa, unidentified
  REGION 1..537: note = Description of Unknown: uncultivated organism sequence
  REGION 1..537: note = Category: MG91 effectors
  REGION 1..537: note = Description: MG91-510 effector
MSTKSFIINLPIITGDQDRRRLRKSFSFGCNLQNAVMGGGWDRVLQMRATAEWQATRAMPKGRERTKAFRDLRVRFRLSEYDFHADVAMHRKASGRGHLLGINECQKLASRAWISVERHLYNGGSPRFISSRRGLHSIEGKTNRTGIIWKADQQCVTVCKRVYRVRVDKRDDWLTRALQDPTDPKKPRKVKYCRIVREMRKGKERFLLQLVAEGTSPLKHAYAGKDLRMAIDPGLGSLTYATEDGTIAKVQIAPSADTDHRAVRKLQRAMERSRQATNPDNYETVEVVRHGKKHKSLKVKSGRLQWRFSKRYESLRAELAEIFRLSAATRKREHGEVCNWLLGHAGHIIVEDNSYKAFQRGRFGKTIGRHAPAALYAQLTNKAESAGLLVEVVSPKKLKPTQHNLLTGQFVKHELWERRVRLGNDDDDRWIDRDAAACLNLLYADLEKQIYAPERIREAVLAGVTAWLDAGVVVIQAREGITEREFGRFRRRGIPSLTVQGLRQQGFRGRSDSKSGATPRRKASTVSKPSHFSGEVV

SEQ ID NO: 3319 - protein, 497 aa, unidentified
  REGION 1..497: note = Description of Unknown: uncultivated organism sequence
  REGION 1..497: note = Category: MG91 effectors
  REGION 1..497: note = Description: MG91-511 effector
MTSPTFIIELPIRVSDSESRTILRKLEFARQLHNATLGTALGQLQQLRQDSEWEKACLMPKGKERSELFRKLDRKYQLTEYDLHTVIAKHRQRSGRKTELGINETQKIATRVFQAVNRYKLGLGGRPRFKSLSRGLRSIEGKSNKTGLKFNIEKSVLSWCKHDYRVFIDPQDDFLQRALRSEGRSGFKKVKYCRLVRKTIKGKNRFYLQVVLEGQAPIKHIYASTNERLSIDPGPQTIAVFSDVWAGKIKVSPTAQVDEKRLRCIQRSMDRSLRKSNSDCYESDGTLRKGCVLKKTKGYEKRIQRLQECHRKAAATRRCEHGQLINLLLSMAGDIRVEKNQWKAFQRGHFGKSLGKSGISGFIERLKSKAESAGLKVTEVKPYKLKLSQYDPYTDQYRKKSLNERWHSLGESSEWIQRDVMSALLLQCADLEEEKHIPTEVIKTLEGVKQLLRDAGYVILKPSSNGESNPTFASEPKAVTPEKVRLEIFCGASDSYL

SEQ ID NO: 3320 - protein, 537 aa, unidentified
  REGION 1..537: note = Description of Unknown: uncultivated organism sequence
  REGION 1..537: note = Category: MG91 effectors
  REGION 1..537: note = Description: MG91-512 effector
MSTKSFIISLPIITGDQDRRRLRKSFSFGCNLQNAVMGGGWDRVLKMRATAEWQTARAMPKSSERTKAFRDLRVRFRLSEYDFHADVAKHRKASGRGHLLGINECQKLASRAWISVERHLYNGGSPRFISSRRGLHSIEGKTNRTGIIWKADQQCVTVCKHVYRVRVDKCDDWLTRALQDPTDPTKPRKVKYCRIVREMRKGKERFLLQLVAEGTSPLKHAYAGKDLRMAIDPGLGSLTYATEDGTIAKVQIAPSADTDHRAIRRIQRAMERSRRATNPDNYEAVDVVRHGKKKKSFKVKSGRLQWRFSKRYESLRAELAEIFRLSAATRKREHGEVCNWLLGHAGSIIVEDNSFKAFQKGHFGKSIGRHAPAAFYTQLTSKAESAGLQVTVVSPRKLKPSQHNLLTDTFVKHELWERRVRLGEDDDERWIDRDAAACLNLLYADIENQTYDPERIREAVLAGVTAWLDAGVVVIQAREGITEREFGRFRRRGIPSLTVQGLRQQGFRGRSDSKSGTTPRRKASTESKPSHFSGEVV

SEQ ID NO: 3321 - protein, 1356 aa, unidentified
  REGION 1..1356: note = Description of Unknown: uncultivated organism sequence
  REGION 1..1356: note = Category: MG91 effectors
  REGION 1..1356: note = Description: MG91-513 effector
MLEKPYYLGLDMGTNSVGWAVTDQQYNLLKAKGKDLWGIREFAEADTSVERRTHRISRRRRQREQARIGLLNDYFHDAIIAIDPSFFQRLENSKYHLEDKDQNVRYKYNIFNDPDYTDADYYTQYPTIYHLRKELLENPKPHDVRLVYLALLNMFKHRGHFLNSGISDGNNERSLKDAYINFAISVSELTEDYFNQDVDYSTIEGILSSRDLNRTKKAEELSTVLGIDFKNKKYKEYLRAICGLKINAYTLFSDQLPDDTTKIDLCVSDASFDEKSEELVSLIGEDLFQIILNIKEIYDIGSLAGILKGYTYLSQARVAAYDKHKHDLKLLKSSIKKYCTKEEYNNFFNSDADGSYASYIGSFNSGNKERRVGSKRTSEDLYKEIKKLLKGANKSDPAINEIFTSIETESFLPKQLTASNGIIPNQVHSKEMARILTNAENYLPFLKETDENNLSISNRILQLYKFQIPYYIGPVTEKSQRDGGNGWVIRKDNGRVFPWNIEEKIDVKATSEAFISRMVRRCTYMNGKQVLPKASLEYESFRVLNEINNLRIDGERIPVTLKQDIYTDLFQKGKKVTKKQLCNYLATRGLIESSEQVTGIDIAINNSLSTYGKFKAIFGEDIKLDHIQHMIEDIVFWCTVYGDSKQFLKEQIEDKYKGKLSPEQMKRILGFKFKDWGNLSKEFFELKGADKSTGEAVSIIRALWENNLNLMELINSPEFDFKEQLADYEANSLKTLSDFEPEDLNDYYFSAPVRRMIWQTTLIIKELVHVLGKEPARIFIEMTREKDASRGRTLSRKKKFEDLYKNVKDENTDWAKVIEHADESGTIRSKKMYLYLTQKGRCMYTGNHIELSDLFNDNLYDIDHIYPRHFVKDDNIDNNLVLVTKEKNAHKSDNYPLEAEIFNKQRNMWTQLRKEGFISEEKYNRLMGRNAFTDEQKAGFIARQLVETSQGTKGVAELFHQLLPNSKIVCAKAGNVSDFRRNRELPKSRLVNDFHHAHDAYLNIVVGNVYYVKFTQNPINYIKNSYNKDMNKNNYNLSRMFDWDVKRGDEVAWIAQKQDGATGTISTVKKMLSKNTPLMTRLSYEGKGALANETLYSAEKAKGEGYIPFKSSDTKIQDVTKYGGFTSVTGAYFFLVEHDEKKKRIRTIESVPLYLADKIDKDSSELERYCDKLGLVNYDIRVRKIKIGSLLNRNGYFAYLTGKTGKQLILRNATNLCLDKKWTRYIKKIEKYKETNVLDSIITSETMVNLYNELLNKFTVGIYGRRPNPIGEKMDSAKNTFTSYTLDNQCNLIYQLSKILGFETDLSLLRTNKQSGKPTREGGMQISKKIDNTTSMYLINQSPTGLFETKIDLQTI

SEQ ID NO: 3322 - protein, 1352 aa, unidentified
  REGION 1..1352: note = Description of Unknown: uncultivated organism sequence
  REGION 1..1352: note = Category: MG91 effectors
  REGION 1..1352: note = Description: MG91-514 effector
MTAFKYYLGLDMGTNSVGWAATDPEYRLLKAKGKDLWGIREFNEASGAVERRTHRISRRRRQREQVRIGILKDYFHDAICEVDPSFFRRLENSKYHEEDKDVEVRYKNNIFNDGNYTDKDYFNEYPTIYHLRNELISSTEKHDVRLVFLALLNMFKHRGHFLNAGLGENNGESNIDNAYFELTELLSELTEYHLSQDIDCKQIEAILSRRDMSRTHKAEELAGVLHVDLKNKPYKELIRGLCGLKFNACVVFPDVQSEEVTKLDICLSESSFDEKSDEIANIIGEDYFEIIMAMKEMFDIGSLASIMKGHNYLSQARVASYTKHKEDLKLLKEVIKKYCSKKEYDKFFNSDADGSYASYVGSYNSKNKERRVGNKRTSEELYKEIKKLLKDAPKEDENVQKILTSIENETFLPKQLTASNGVIPNQVHAREMKKILSNAENYLPFLTEKDETGLSVSERILKLFTFQIPYYVGPTSENSGKNGGNGWVVRREDGQVLPWNIDEKIDMKATSEAFISRMVRRCTYISGEQVLPKASLEYQSYCVLNEINNIKIDGERISVELKQDIYKAVFQKGKKVTKKQLCKYLHTRGIIETEEQVTGVDVSINNALTTYGKFKPIFGEDISKDSVQKMIEDIVFWCTVYGDSKKFLKDRIEEKYGNKLSEEQIKRILGFKFKDWGNLSKKFLELNGADTSTGESISIIRALWNNNLNLMELINSSLYNYKECLAEYQNTMLKTLSEIEAEDLNEYYFSAPVRRMIWQTILVIKELVKVLGCEPERIFVEMTRRPDEHKTRTSSRRNKFEELYKKVKDEATDWMQVIAKAEEDGKIRSKKMYLYLTQKGRCMYTGKHIELDDLFDKNLYDIDHIYPRHFVKDDNIDNNLVLVCKEKNAHKSDHYPIEEEIFLSQKKMWLELRKSGFITEEKYNRLMDRNPFSDEQKAGFIARQLVETSQGTKGVANILRQLLPGSKIVYAKASNVSEFRHTRDDIPKSRLVNDFHHAHDAYLNIVVGNVYYVKFTQNPLNFIKKDYDKYKEDYNLSKMFDWDVKRNGEVAWIAQRKDGEAGTITTVKRMLSRNTPLMTRYSFEGKGGLANETLCSAKKAKGEGYIPFKSSDDKMQDVTKYGGFTKVTGAYFFLVEHTEKKKRIRTIESVPVYLAQKIEQNPDELKKYCKEILGLVDADIRLKKIKIGSLIKRNGYFCYITGKTGNRLSVRNAVNLCLKNEWIKYISKLEKVKEKDAVDEIITKEKNEVLYSELIQKFKHGIFSKRPNPVEDKLEKGSEKFSNLSIKEQCALLCQILQLAAVLGSECDMTLLGESAHCGKMLISKKIGDEEIYLLNQSVTGLYEKKINLHTV

SEQ ID NO: 3323 - protein, 1033 aa, unidentified
  REGION 1..1033: note = Description of Unknown: uncultivated organism sequence
  REGION 1..1033: note = Category: MG91 effectors
  REGION 1..1033: note = Description: MG91-515 effector
MTAFKYYLGLDMGTNSVGWAATDPEYRLLKAKGKDLWGIREFNEASGAVERRTHRISRRRRQREQVRIGILKDYFHDAICEVDPSFFRRLENSKYHEEDKDVEVRYKNNIFNDGNYTDKDYFNEYPTIYHLRNELISSTEKHDVRLVFLALLNMFKHRGHFLNAGLGENNGESNIDNAYFELTELLSELTEYHLSQDIDCKQIEAILSRRDMSRTHKAEELAGVLHVDLKNKPYKELIRGLCGLKFNACVVFPDVQSEEVTKLDICLSESSFDEKSDEIANIIGEDYFEIIMAMKEMFDIGSLASIMKGHNYLSQARVASYTKHKEDLKLLKEVIKKYCGKKEYDKFFNSDADGSYASYVGSYNSKNKERRVGNKRTSEELYKEIKKLLKDAPKEDENVQKILTSIENETFLPKQLTASNGVIPNQVHAREMKKILSNAENYLPFLTEKDETGLSVSERILKLFTFQIPYYVGPTSENSGKNGGNGWVVRREDGQVLPWNIDEKIDMKATSEAFISRMVRRCTYISGEQVLPKASLEYQSYCVLNEINNIKIDGERISVELKQDIYKAVFQKGKKVTKKQLCKYLHTRGIIETEEQVTGVDVSINNALTTYGKFKPIFGEDISKDSVQKMIEDIVFWCTVYGDSKKFLKDRIEEKYGNKLSEEQIKRILGFKFKDWGNLSKKFLELNGADTSTGESISIIRALWNNNLNLMELINSSLYNYKECLAEYQNTMLKTLSEIEAEDLNEYYFSAPVRRIIWQTILVIKELVKVLGCEPERIFVEMTRRPDEHKTRTSSRRNKFEELYKKVKDEATDWMQVIAKAEEDGKIRSKKMYLYLTQKGRCMYTGKHIELDDLFDKNLYDIDHIYPRHFVKDDNIDNNLVLVCKEKNAHKSDHYPIEEEIFLSQKKMWLELRKSGFITEEKYNRLMGRSPFSDEQKAGFIARQLVETSQGTKGVANILRQLLPGSKIVYAKASNVSEFRHTRDDIPKSRLVNDFHHAHDAYLNIVVGNVYYVKFTQNPLNFIKKDYDKYKEG

SEQ ID NO: 3324 - protein, 1358 aa, unidentified
  REGION 1..1358: note = Description of Unknown: uncultivated organism sequence
  REGION 1..1358: note = Category: MG91 effectors
  REGION 1..1358: note = Description: MG91-516 effector
MEKEYYLGLDMGTNSVGWAVTDDAYNLIRFKGKDMWGIREFDEANPAVERRTHRTSRRRKQRNAVRMGLIRSYFADEIQKVDSNFYQRLDNSFFHVEDKQDNVKDKNGIFNDKNYKDADYYKQYPTIFHLRKELIEDASQKDVRLVYLAVANMFKHRGHFLLSGIGSESSKQTITDLYNQVSGLITEEYGISLKTDIAGTDFEQVLCSREYSRTRKSEKVCEILEIKNSDKLKKAFVKSMCGLSVKITDIIDDTFTEISDEDKKITFSFVDSDYDEKAGVLEEKLGTDVYDIISKLKEIHDKAQVAEIMKNYQYLSFARVADYEKHKKDLKILKRVVKKYFEPTVYDKLFRSEENGTYSAYVNSFNSEEKSRRNYKERKQEDLYNSIKKLLKSVDNVDDTDIEYIKNEMDKENFLPKQLTFKNGVIPNQIHASELKAILKNAEKYLPFLNEKDESGYTVSERILMLFSFQIPYYVGPVSSNSNGWVKRLEPGQVLPWNIDKKIDLKETSEQFIQRMVRNCTYIAGEKVLPKASLLYENFKVLNEINNLSINGERITVNLKQDLYNTLFLKGKRVTRKQIFNYFHSRGLVEEDSQISGIDIAVNNSLSTYGKFLPLFGEHLKEDKYKKMVDDIVFWCTVYGDSRKFLREQLEEKYSDVLDENQIKRITGMKFKDWGNLSKEFLELSGCCKSTGEVMPLIRAMWETNYNLMELLHGEEFTYSEELEEKQGKIEKVLSEYTIDDLNEEYFSAPVKRMVWQTLLIIKEIEKIMKCPPTRIFVEMTRKDDEKGDNGRKSSRKDQLLALYKKIQSEDKEWKKEMSSRIEDYDKNGALRSKKLYLYFIQKGLDMYTGKPIDLDNLMSANSNYDIDHIYPRHFVKDDNINNNLVLASKPANAEKSDIYPIKDSIYQKMKYTWKVLRDEGLITEEKYKRLTGRNPFTDEQKAGFIARQLVETGQGTKGVADLLTALLPDTKLVYSKAGNVSDFRKRYDIPKSRLINDFHHAHDAYLNIVVGNIYFTKFTSNPLNYIRKECSSKDNKYQYNLGNMYKWDVKRDGKTAWVAPEEGETGTLATVKKMLSRNTPILTRLTIEGHGGIADATLYSHKKAKQDTYIPLKSSDARMADVTKYGGYSSVTTAYLFLVEHEIKGKKIRTLETVPIYLKDRLENSKEKLEENCRETLGYTNPSVRMKKIKLQSLIKLNGYYMQISGRTGNRFTLRNYVQLCLNGKWVDYIHKLEKYQDKGVIDDLITDERNVELYNVLCEKHSVGIFTLRPNLVGDKIKNGYDKFVNLTTEEQIKLLIEIIKLTCVGIVSANLTLIGGAAISGKMLMSKNITYANECILINQSVTGLYENRIDLLRV

SEQ ID NO: 3325 - protein, 1352 aa, unidentified
  REGION 1..1352: note = Description of Unknown: uncultivated organism sequence
  REGION 1..1352: note = Category: MG91 effectors
  REGION 1..1352: note = Description: MG91-517 effector
MTAFKYYLGLDMGTNSVGWAATDPGYRLLKAKGKDLWGIREFNEASGAVERRTHRISRRRRQREQVRIGILKDYFHDAICEVDPSFFQRLENSKYHEEDKDVEVRYKNNIFNDSNYTDKDYFNEYPTIYHLRNELISSTEKHDVRLVFLALLNMFKHRGHFLNAGLGENNGESNIDNAYFELTELLSELTEYHLSQDIDCKQIEAILSRRDMSRTHKAEELAGVLHVDLKNKPYKELIRGLCGLKFNACVVFPDVQSEEVTKLDICLSESTFDEKSDEIANIIGEDYFEIIMAMKEMFDIGSLASIMKGHNYLSQARVASYTKHKEDLKLLKEVIKKYCGKKEYDKFFNSDADGSYASYVGSYNSKNKERRVGNKRTSEELYKEIKKLLKDAQKEDENVQKILTSIENETFLPKQLTASNGVIPNQVHAREMKKILSNAENYLPFLTEKDETGLSVSERILKLFTFQIPYYVGPTSENSGKNGGNGWVVRREDGQVLPWNIDEKIDMKATSEAFISRMVRRCTYISGEQVLPKASLEYQSYCVLNEINNIKIDGERISVELKQDIYKAVFQKGKKVTKKQLCKYLHTRGIIETEEQVTGVDVSINNALTTYGKFKPIFGEDISKDSVQKMIEDIVFWCTVYGDSKKFLKDRIEEKYGNKLSEEQIKRILGFKFKDWGNLSKKFLELNGADTSTGESISIIRALWNNNLNLMELINSSLYNYKECLAEYQNTMLKTLSEIEAEDLNEYYFSAPVRRMIWQTILVIKELVKVLGCEPERIFVEMTRKPDEHKTRTSSRRNKFEELYKKVKDETTDWMQVIANAEEDGKIRSKKMYLYLTQKGRCMYTGKHIELDDLFDNNLYDIDHIYPRHFVKDDNIDNNLVLVCKEKNAHKSDHYPIEEEIFLSQKKMWLELRKSGFITEEKYNRLMDRNPFSDEQKAGFIARQLVETSQGTKGVANILRQLLPGSKIVYAKASNVSEFRCTRDDIQKSRLVNDFHHAHDAYLNIVVGNVYYVKFTQNPLNFIKKDYDKYKEDYNLSKMFDWDVKRNGEVAWIAQRKDGAAGTITTVKRMLSRNTPLMTRYSFDGKGGLTNETLYSAKKAKGEGYIPFKSSDDKMQDVTKYGGFTSVTGAYFFLVEHTEKKKRIRTIESVPVYLAQKIEQNPDELKKYCEEILGLIDADIRLKKIKIGSLIKRNGYFCYITGKTVNRLIVRNAVNLCLKNEWIKYISKLEKVKEKDAVDKIITKEKNEVLYSELIQKFKHGIFSKRPNPVGDKLEKDSEKFNNLSIKDQCAVLCQVLRMAAILGSECDMTLLGDSPNCGKMLISKKIGDEEIYLINQSVTGLYEKKINLHTV

SEQ ID NO: 3326 - protein, 613 aa, unidentified
  REGION 1..613: note = Description of Unknown: uncultivated organism sequence
  REGION 1..613: note = Category: MG91 effectors
  REGION 1..613: note = Description: MG91-518 effector
MMAKETFVLTLPLKVEKWQADILDKRYELLRQIYNMVQQKLLRQYIYFSQQKAYKTCKGDFQQIREFFASHPFHFKDIKGRNGEPSDIKFPYTYESRSSSSGKRTPNGISDFISKLWAHRIGEDKTLADFGINSSILEELGLHVMQAWEKRIYDPKSSRVSFKKYGDINSFGSRCKNGSFAGFTINLGKGHITFNTNGRQRKSAELITLPIDFSREKKGYAASALKDGIDSLRKLIIVRKCIRGKNKYYLQLTISGEKPQKGRTLGRGNVGIDIGPSTIAISSLQCVHFEKLADRCDNIEHDLFLVNRKLDRSRRANNPLNFNTDRTIKRISRQKGEHRVWHDSNRYKRLKLVRKELFRKQAEIRKQQHLQMANVILSQGDTFVVENNPIDAWARRAKETTKTKTGKNRCKKRYGKSVANHAPAMFVSILRNKVQSLGGAFHEVDVRYAATQFDFTNGTKTKHEVSERSITLSNGHTHQRDMLSAFNLQHIKLESIGTEDKEYDIEQMEADYPIFRELETAELRRFKVVRHNERDALYFAGASEKHLRHQPQDESVDNRHNGGVGRKHCNTRIGSENAEITGSGLVRESIERVSQVPDEYHISSHQPIVLDGL

SEQ ID NO: 3327 - protein, 530 aa, unidentified
  REGION 1..530: note = Description of Unknown: uncultivated organism sequence
  REGION 1..530: note = Category: MG91 effectors
  REGION 1..530: note = Description: MG91-519 effector
MTSPSFVIELPIAVDDAEMRTIVRKLEFARQLHNATLGTAMGQLQQMRQDAAWKEACVMPKGKERAAAFRALDRKYGLTEYDLHSVIARHREGTGRKAELGINETQKIATRVFQAINRYKLGLGGMPRFKSFKRGLHSIEGKTNKTGLKFKPEQKVLNWCGHDYRVLIDPKDDYIQRALKDNERSDQYRKIKYCRLVRRRIRSADRFFLQVVLEGTAPVKHVYAPVTERAAIDPGPQSIALFSKAFAGKIQVAGSNNFNEAASRRLLRAMDRSLRRNNPDAYNEDGTINKGVKLAKSKNYQRKVDRLHEMHRVAAAQRKCRHGQTINLLLSIAGDIRIEKNSWKAFQRGHFGKSLGKSAMSGFIAQLKSKAESAGLKVTEVNPYKLKLSQYDPYTDTYRKKDLSERWQEMKAGSGQYIQRDVLSALLLYCADIEKEIHIPKAAVEQLEGAKQLLTDAGYVVLKSTSSRDQRDPRLASEPKAMTPEMARQKILRGAGDSHLPTDQALGRIRAGEKVSTWSKETFPLQRGVV

SEQ ID NO: 3328 - protein, 484 aa, unidentified
  REGION 1..484: note = Description of Unknown: uncultivated organism sequence
  REGION 1..484: note = Category: MG91 effectors
  REGION 1..484: note = Description: MG91-520 effector
MAHKENQKAFVITFPLRTEKWQEDRIDKMMRMLTTLYNDRQRKLVRRYIYLSHSKAYHEAKGKGVVAFKNYMKENGFSQYGLDAFFKADTKGALYQCGLNSMFLQYLSQCAWSAWDKKLFGKGDFVKTDKVVNIFCSRNKNGRFCGFDYDLSTFTIRIKSTCTKEIICSIPFVVNKNSEYELYALSQKICRIGIVRKLIRSKYKYYVQFTFDGVPYNKGRNIGTGIVGIDPGPSKIAIVGDNKVEIVKLAPNIEEDERKTARLKRKLDRSRRATNPHMYNEDGTIIKGQRQTCFSKAYNETRKQLADAQRKLAAKRKIAHNELANTLLEYGDTFKVEANSYKSMQARTKATSMTKSGRIRSKKRYGKSIKNRAPSEFLVILKNKLLYYPKGKYYDVPSSYACTQFDFTNESFTEHKISERRIVTSDGIQHNRDTLAAFNIKNAIVNDTSTKKKKFTKSKEFFDIVKMKASYNKFCVMERYLLSV

SEQ ID NO: 3329 - protein, 1358 aa, unidentified
  REGION 1..1358: note = Description of Unknown: uncultivated organism sequence
  REGION 1..1358: note = Category: MG91 effectors
  REGION 1..1358: note = Description: MG91-521 effector
MEKEYYLGLDMGTNSVGWAVTDDAYNLIRFKGKDMWGIREFDEANPAVERRTHRTSRRREQRNAVRMGLIRSYFADEIQKVDSNFYQRLDNSFFHVEDKQDNVKDKNGIFNDKNYKDADYYKQYPTIFHLRKELIEDDSQKDVRLVYLAVANMFKHRGHFLLSGIGSESSKQTITDLYNQVSGLITEEYGISLKTDIAGTDFEQVLCSREYSRTRKSEKVCEILEIKNSDKLKKAFVKSMCGLSVKITDIIDDTFTEISDEDKKITFSFVDSDYDEKAGVLEEKLGTDVYDIISKLKEIHDKAQVAEIMKNYQYLSFARVADYEKHKKDLKILKRVVKKHFEPTVYDKLFRSEENGTYSAYVNSFNSGEKSRRNYKERKQEDLYNSIKKLLKSVDNVYDTDIEYIKNEMDKENFLPKQLTFKNGVIPNQIHASELKAILKNAEKYLPFLNEKDESGYTVSERILMLFSFQIPYYVGPVSSNSNGWVKRLESGQVLPWNIDKKIDLKETSEQFIQRMVRNCTYIAGEKVLPKASLLYENFKVLNEINNLSINGERITVNLKQDLYNTLFLKGKRVTRKQIFNYFHSRGLVEEDSQISGIDIAVNNSLSTYGKFLPLFGEHLKEDKYKKMVDDIVFWCTVYGDSRKFLREQLEEKYSDVLDENQVKRITGMKFKDWGNLSKEFLELSGCCKSTGEVMPLIRAMWETNYNLMELLHSEEFTYSEELEEKQGKIEKVLSEYTIDDLNEEYFSAPVKRMVWQTLLIIKEIEKIMKCPPTRIFVEMTRKDDEKGDNGRKSSRKDQLLALYKKIQSEDKEWKKEMSSRIEDYDKKGALRSKKLYLYFIQKGLDMYTGKPIDLDNLMSANSNYDIDHIYPRHFVKDDNINNNLVLASKPANAEKSDIYPIKDSIYQKMKYTWKVLRDEGLITEEKYKRLTGRNPFTDEQKAGFIARQLVETGQGTKGVADLLTALLPDTKLVYSKAGNVSDFRKRYDIPKSRLINDFHHAHDAYLNIVVGNIYFTKFTSNPLNYIRKECSSKDNKYQYNLGNMYKWDVKRDGKTAWVAPEEGETGTLATVKKMLSRNTPILTRLTIEGHGGIADATLYSHKKAKQDTYIPLKSSDARMADVTKYGGYSSVTTAYLFLVEHEIKGKKIRTLETVPIYLKDRLENSKEKLEEYCRETLGYTNPSVRMKKIKLQSLIKLNGYYMQISGITGNRFTLRNYVQLCLNGKWVDYIHKLEKYQDKGVIDDLITDERNVELYNVLCEKHSVGIFTLRPNLVGDKIKNGYDKFVNLTTEEQIKLLIEIIKLTCVGIVSANLTLIGGAAISGKMLMSKNITDANECILINQSVTGLYENRIDLLRV

SEQ ID NO: 3330 - protein, 537 aa, unidentified
  REGION 1..537: note = Description of Unknown: uncultivated organism sequence
  REGION 1..537: note = Category: MG91 effectors
  REGION 1..537: note = Description: MG91-522 effector
MSTKSFIISLPIITGDQDRRRLRKSFSFGCNLQNAVMGGGWDRVLQMRATPEWQATRAMPKGRERTKAFRDLRVRFRLSEYDFHADVAMHRKASGRGHLLGINECQKLASRAWISVERHLYNGGAPRFISSRRGLHSIEGKTNRTGIIWKADQQCVTVCKHVYRVRVDKRDDWLTRALQDPTDPTKPRKVKYCRIVREMRKGKERFLLQLVAEGTSPLKHAYAGKDLRMAIDPGLGSLTYATEDGTIAKVQIAPSADTDHRAVRKLQRAMERSRQATNPDNYETVEVVRHGKKHKSLKVKSGRLQWRFSKRYEKLRSELAEMLRLCAATRKREHGEVCNWLLGHAGHIIVEDNSFKAFQKGHFGKSIGRHAPAAFYTQLTSKAESAGLQVTVVSPRKLKPSQHNLLTDTFVKHELWERRVRLGKDDDDRWIDRDAAACLNLLYADIENQTYDPERIREAVLAGVTAWLDAGVVVIQAREGITEREFGRFRRRGIPSLTVQGLRQQGFRGRSDSKSGATPRRKASTVSKPSHFSGEVV

SEQ ID NO: 3331 - protein, 537 aa, unidentified
  REGION 1..537: note = Description of Unknown: uncultivated organism sequence
  REGION 1..537: note = Category: MG91 effectors
  REGION 1..537: note = Description: MG91-523 effector
MSTKSFIISLPIITGDQDRRRLRKSFSFGCNLQNAVMGGGWDRVLKMRATAEWQTARAMPKNSERTKAFRDLRVRFRLSEYDFHADVAKHRKASGRGHLLGINECQKLASRAWISVERHLYNGGSPRFISSRRGLHSIEGKTNRTGIIWKADQQCVTVCKHVYRVRVDKRDDWLTRALQDPTDPTKPRKVKYCRIVREMRKGKERFLLQLVAEGTSPLKHAYAGKDLRMAIDPGLGSLTYATEDGTIAKVQIAPSADTDHRAIRRIQRAMERSRRATNPDNYEAVDVVRHGKKKKSFKVKSGRLQWRFSKRYESLRAELAEIFRLSAATRKREHGEVCNWLLGHAGSIIVEDNSFKAFQKGHFGKSIGRHAPAAFYTQLTSKAESAGLQVTVVSPRKLKPSQHNLLTGQFVKHELWERRVRLGNDDDDRWIDRDAAACLNLLYADLEKQTYAPERIREAVLAGVTAWLDAGVVVIQAREGITEREFGRFRRRGIPSLTVQGLRQQGFRGRSDSKSGATPRRKASTVSKPSHLSGEVV

SEQ ID NO: 3332 - protein, 530 aa, unidentified
  REGION 1..530: note = Description of Unknown: uncultivated organism sequence
  REGION 1..530: note = Category: MG91 effectors
  REGION 1..530: note = Description: MG91-524 effector
MTSPSFVIELPIAVDDAEMRTIVRKLEFARQLHNATLGTAIGQLQQMRQDTAWKQACAMPKGKERTAAFRALDRKYGLTEYDLHSVIARHREGTGRKAELGINETQKIATRVFQAINRYKLGLGGMPRFKSFKRGLHSIEGKTNKTGLKFKPEQKVLNWCGHDYRVLIDPKDDYIQRALKDNERSDQYRKIKYCRLVRRRIRSADRFFLQVVLEGTAPVKHIYAPVVERAAIDPGPQSIALFSKEFAGKIQVAGPNNFNEAASRRLLRAMDRSLKRNNPDAYNEDGTIKKGAKLVKSKNYQRKVDRLHEMHRVSAAERRCLHGQTINLLLSIAGDIRIEKNSWKAFQRGHFGKSLGKSAMSGFIAQLKSKAESAGLKVTEVNPYKLKLSQYDPYTDTYRKKALSERWQEMKAGSGQYIQRDVLSALLLYCADIEKEIHIPKAAVEQLEGAKQLLTDAGYVVLKSTSSRDQRDPRLAPEPKAMTPEMARQKILRGAGDSHLPTDQALGWIRAGEKVSTWSKETFPLQRGVV

SEQ ID NO: 3333 - protein, 484 aa, unidentified
  REGION 1..484: note = Description of Unknown: uncultivated organism sequence
  REGION 1..484: note = Category: MG91 effectors
  REGION 1..484: note = Description: MG91-525 effector
MAHKENQKAFVVTFPLRTEKWQEDRIDKMMRMLTTFYNDRQRKLVRRYIYLSHSKAYKEAKGKGVVAFKNYMKENGFSQYGLDAFFKADTKGALYQCGLNSMFLQYLSQCAWSAWDKKLFGKGDFVKTDKVVNIFCSRNKKERFCGFDYDLSTFTIRIKSTCTKKIICTIPFVVNKNSEYELYALSQKICRIGIVRKLIRSKYKYYVQFTFDGVPYNKGRNIGTGIVGIDPGPSKIAIVGDNKVEIAKLAPNLIEDERKTARLKRKLDRSRRATNPHMYKEDGTIIKGQRQTCFSKVYNETRKQLADAQRKLAAKRKIAHNELANTLLEYGDTFKVEANSYKSMQARAKATSMTKSGRIRSKKRYGKSINNRAPSEFLVILKNKLLYYPKGKYYDVPSSYACTQFDFTNESFTEHKISERRIVTSDGIQHNRDTLAAFNIKNAIVNDTSTKKKKVTKSKEFFDIVKMKASYNDFCLMERYLLSV

SEQ ID NO: 3334 - protein, 525 aa, unidentified
  REGION 1..525: note = Description of Unknown: uncultivated organism sequence
  REGION 1..525: note = Category: MG91 effectors
  REGION 1..525: note = Description: MG91-526 effector
MTSQSFVIELPIAVDDAEMRTIVRKLEFARQLHNATLGTAMGQLQQMRQDAAWKEACVMPKGKERAAAFRALDRKYGLTEYDLHSVIARHREGSGRKAELGINETQKIATRVFQAINRYKLGLGGMPRFKSSKRGLHSIEGKTNKTGLKFRPEKKVLNWCGHDYRVLIDPKDDYIQRALKENERSDKYRKIKYCRLVRKRIRSADRFFLQVVLEGTAPVKHIYAPVTERAAIDPGPQSIALFSKAFAGKIQVAGSSNFNESASRRLLRAMDRSLRRNNPDAYNEDGTIKKGAKLVKSKNYQRKVDRLREMHRVAAAERKCRHGQTINLLLSIAGDIRIEKNSWKAFQRGHFGKSLGKSAMSGFIAQLKSKAASAGLKVTEVNPYKLKLSQYDPYTDTYRKKDLSERWQEMKAGSGQYIQRDILSALLLYCADIEKEIHIPKVAVEQLEGAKQFLTDAGYVVLKSTSSRDQRDLRLAPEPKAMTPEMARQKILRGAGDSHLPTDQALGRIRAGGKVSTWSKETFPL

SEQ ID NO: 3335 - protein, 537 aa, unidentified
  REGION 1..537: note = Description of Unknown: uncultivated organism sequence
  REGION 1..537: note = Category: MG91 effectors
  REGION 1..537: note = Description: MG91-527 effector
MSTKSFIISLPIITGDQDRRRLRKSFSFGCNLQNAVMGGGWDHVLQMRVTPEWHATRAMPKGRERTKAFRDLRVRFRLSEYDFHADVAKHRKASGRCHLLGINESQKLASRAWISVERHLYNGGSPRFISSRRGLHSIEGKTNRTGIIWKADQQCVTVCKHVYRVRVDKCDDWLTRALQDPTDPTKPRKVKYCRIVREMRKGKERFLLQLVAEGTSPLKHAYAGKDLRMAIDPGLGSLTYATEDGTIAKVQIAPSADTDHRAIRRIQRAMERSRRATNPDNYEAVDVVRHGKKKKSFKVKSGRLQWRFSKRYESLRAELAEIFRLSAATRKREHGEVCNWLLGHAGHIIVEDNSYKAFQKGHFGKSIGRHAPAAFYTQLTSKAESAGLQVTVVSPRKLKPSQHNLLTDTFVKHELWERRVRLGNDDDDRWIDRDAAACLNLLYADLEKQTYAPERIREAVLAGVTAWLDAGVVVIQAREGITEREFGRFRRRGIPSSTVQGLRQRGFRGRSDSKSGTTPRRKASTVSKPSHFSGEVV

SEQ ID NO: 3336 - protein, 1108 aa, unidentified
  REGION 1..1108: note = Description of Unknown: uncultivated organism sequence
  REGION 1..1108: note = Category: MG91 effectors
  REGION 1..1108: note = Description: MG91-528 effector
MTAFKYYLGLDMGTNSVGWAATDPEYRLLKAKGKDLWGIREFNEASGAVERRTHRISRRRKQREQVRIGILKDYFHDAICEVDPSFFQRLENSKYHEEDKDVEVRYKNNIFNDSNYTDKDYFNEYPTIYHLRNELISSTEKHDVRLVFLALLNMFKHRGHFLNAGLGENNGESNIDNAYFELTELLSELTEYHLSQDIDCKQIEAILSRRDMSRTHKAEELAGVLHVDLKNKPYKELIRGLCGLKFNACVVFPDVQSEEVTKLDICLSESTFDEKSDEIANIIGEDYFEIIMAMKEMFDIGSLASIMKGHNYLSQARVASYTKHKEDLKLLKEVIKKYCGKKEYDKFFNSDADGSYASYVGSYNSKNKERRVGNKRTSEELYKEIKKLLKDAQKEDENVQKILTSIENETFLPKQLTASNGVIPNQVHAREMKKILSNAENYLPFLTEKDETGLSVSERILKLFTFQIPYYVGPTSENSGKNGGNGWVVRREDGQVLPWNIDEKIDMKATSEAFISRMVRRCTYISGEQVLPKASLEYQSYCVLNEINNIKIDGERISVELKQDIYKAVFQKGKKVTKKQLCKYLHTRGIIETEEQVTGVDVSINNALTTYGKFKPIFGEDISKDSVQKMIEDIVFWCTVYGDSKKFLKDRIEEKYGNKLSEEQIKRILGFKFKDWGNLSKKFLELNGADTSTGESISIIRALWNNNLNLMELINSSLYNYKECLAEYQNTMLKTLSEIEAEDLNEYYFSAPVRRMIWQTILVIKELVKVLGCEPERIFVEMTRRPDEHKTRTSSRRNKFEELYKKVKDETTDWMQVIANAEEDGKIRSKKMYLYLTQKGRCMYTGKHIELDDLFDNNLYDIDHIYPRHFVKDDNIDNNLVLVCKEKNAHKSDHYPIEEEIFLSQKKMWLELRKSGFITEEKYNRLMGRSPFSDEKKAGFIARQLVETSQGTKGVANILRQLLPGSKIVYAKASNVSEFRHTRDDIPKSRLVNDFHHAHDAYLNIVVGNVYYVKFTQNPLNFIKKDYDKYKEDYNLSKMFDWDVKRNGEVAWIAQRKDGEAGTITTVKKMLSRNTPLMTRYSFEGIFKAYLRNLMRQLEAMEQVECHS

SEQ ID NO: 3337 - protein, 537 aa, unidentified
  REGION 1..537: note = Description of Unknown: uncultivated organism sequence
  REGION 1..537: note = Category: MG91 effectors
  REGION 1..537: note = Description: MG91-529 effector
MSTKSFIINLPIITGDQDRRRLRKSFSFGCNLQNAVMGGGWDRVLRMRATPEWQAARVMPKGSERTKAFRDLRVQFRLSEYDFHADVAKHRKASGRSHLLGINESQKLASRAWISVERHLYNSGSPRFISSRRGLHSIEGKTNRTGIIWKADQQCVTVCKHVYRVRVDKRDDWLTRALQDPTDPTKPRKVKYCRIVRNVRKGKECFDLQLIAEGTSPLKHAYAGKDQRMAIDPGLGSLTYATEDGKIAKVQIAPNADTDHRAVRRIQRAMERSRQATNPDNYETVDVVRHGKKRQSLKVKSGRLEWRFSKRYEKLRAELAETHRLAAATRKREHGEVCNWLLGHAGTIIVEDNSFKAFQKGRFGKSIGRYAPAAFYTQLTSKAESAGLQVKVVSPKKLKPTQHNLLTGRFVKHELWERRVQLGDRTGVCWIDRDAAACVNLLYADLDQQTYDPKRIREAVLAGVTAWLDAGVVVIQAREGITEREFGRFRGRGIPSLAVQGLRQQGFRGRSDSKSGTTPRRKASTVPKPSHFSGEVV

SEQ ID NO: 3338 - protein, 537 aa, unidentified
  REGION 1..537: note = Description of Unknown: uncultivated organism sequence
  REGION 1..537: note = Category: MG91 effectors
  REGION 1..537: note = Description: MG91-530 effector
MSTKSFIISLPIITGDQDRRRLRKSFSFGCNLQNAVMGGGWDRVLKMRATAEWQTARAMPKSSERTKAFRDLRVHFRLSEYDFHADVAMHRKASGRGHLLGINECQKLASRAWISVERHLYNGGSPRFISSRRGLHSIEGKTNRTGIIWKADQQCVTVCKHVYRVRVDKRDDWLTRALQDPTDPTKPRKVKYCRIVREMRKGKERFLLQLVAEGTSPLKHAYAGKDLRMAIDPGLGSLTYATEDGTIAKVQIAPSADTDHRAVRKLQRAMERSRQATNPDNYEAVDVVRHGKKKKSFKVKSGRLQWRFSKRYEKLRSELAEMLRLCAATRKREHGEVCNWLLGHAGHIIVEDNSYKAFQRGRFGKTIGRHAPAALYAQLTNKAESAGLLVEVVSPKKLKPTQHNLLTGQFVKHELWERRVRLGNDDDDRWIDRDAAACLNLLYADLEKQTYVPERIREAVLAGVTAWLDAGVVVIQAREGITEREFGRFRRRGIPSLTVQGLRQQGFRGRSDSKSGTTPRRKASTESKPSHFSGEVV

SEQ ID NO: 3339 - protein, 535 aa, unidentified
  REGION 1..535: note = Description of Unknown: uncultivated organism sequence
  REGION 1..535: note = Category: MG91 effectors
  REGION 1..535: note = Description: MG91-531 effector
MKTNSLVLSYELTLPQRIYPELDRLFSAFKWEVRGLVDELWNEEGFGLLRKAGSACSILKNAIKKPPVLPSRAYRNILELSGQIIRSHLKRKEIFDYIMDNPHLVFCNENIIARDFDTSPFFVSNIQNQIRNLFQKGKIVQKEDYFSIVKSCFSGNVVITSADDNLEKGQFRRLEIKGDKLIFEIKVPDSKGWKWIKVTKLIPNRLRKVLSRAKTVESPLIKRVFLKSGFTVYKLIIPVQIETKTKDKIEKVFAVDLSPSEKRLGTGVVVSEEGYSKPVFFSAYKMVKKLERLYRELSDLERKIDNIGNQIHRTKKNHRGILYQRLKHLFAERKLRWKKFKELRKQVLEVFINLIIEHAKTYSCDAIAIENLKFKALPDWNSKKFRRHFSLWFYSKFEKRLKHKALRSGLRVIKVNPYRSSRRCHICGYEGKTNRLEFICSKCQKRFDRDYNAAINIGIKALAVYRTKSEPYMGKDIPGSSPFPQVPVHQILPFKFKSLLFTVSFLKLLSYLRVVETSYLKFGKLTGWISLDKCS

SEQ ID NO: 3340 - protein, 524 aa, unidentified
  REGION 1..524: note = Description of Unknown: uncultivated organism sequence
  REGION 1..524: note = Category: MG91 effectors
  REGION 1..524: note = Description: MG91-532 effector
MEEVFVLELPLQVEKYQADILNKRYEQLRQLYNYVQGKLLRQYKYFEQMSEFQACKTIREKRDFFRSHPFHINGHLAGDKELPEITFDEYGIKGFVEKLAQKSVGPNMTYADLGFTTYILDHLGASIWSAWDKKLYDYRAKRISFKKYGEQDSFSSRRKVVRGKVYFSGLELHLDTMELAIKLNGKVGKEAKFVTLRILHNPKHADYEMWALKGGLDSVKVVKVVRRFVRGQYKYYVQLSIESEKPQKGRTLGKGNVGIDIGPTTVAVSGENIACIDKLASNCDNIQEEITRLARKIDRSRRANNPQNFNEDGTIKRGVRLVWNDSKRYKALRREMAELQRRQAAIRKQQHIDRANELLKEGDTFIVENNQISGWTRKAKETKVNEKTGKIQKKKRFGKSVANHAPAMFVTILENKVKSLGGEVVKVDTQNAASQYDFTNGEFTKHELGERTVTLSNGDTHQRDMLAAFNLQHLKYDAPEKKQYDTKAMAQHYERFCELEQEEIMRYKNKEKKDDHSTIGAEKL

SEQ ID NO: 3341 - protein, 467 aa, unidentified
  REGION 1..467: note = Description of Unknown: uncultivated organism sequence
  REGION 1..467: note = Category: MG91 effectors
  REGION 1..467: note = Description: MG91-533 effector
MGSCSENARHGRVADRKSHADVASGRGHLLGINECQKLASRAWISVERHLYNGGAPRFISSRRGLHSIEGKTNRTGIIWKADQQCVTVCKHVYRVRVDKRDDWLTRALQDPTDPTKPRKVKYCRIVREMRKGKERFFLQLVAEGSSPLKHAYAGKDLRMAIDPGLGSLTYATEDGTIAKVQIAPSADTDHRAVRKLQRAMERSRQATNPDNYETVEVVRHGKKHKSLKVKSGRLQWRFSKRYEKLRSELAEMLRLCAATRKREHGEVCNWLLGHAGHIIVEDNSYKAFQRGRFGKTIGRHAPAALYAQLTNKAESAGLLVEVVSPKKLKPTQHNLLTGQFVKHELWERRVRLGNEDDDRWIDRDAAACLNLLYADLEKQTYAPERIREAVPAGVTARLDAGVVVIQAREGITDREFGRFRRRGIPSLTVQGLRQQGFRGRSDSKSGATPRRKASTVSKPSHFSGEVV

SEQ ID NO: 3342 - protein, 524 aa, unidentified
  REGION 1..524: note = Description of Unknown: uncultivated organism sequence
  REGION 1..524: note = Category: MG91 effectors
  REGION 1..524: note = Description: MG91-534 effector
MNEVFVLELPLQVEKYQADVLNKRYEQLRQLYNYVQGKLLRQYRYFEQMKEFQACKTIKEKRDFFRSHPFQINETLKGNKIPFMVSFDEYSIKGFVEKLAQKPVGANMTFADLGFTTYILDHLGASIWAAWDKMLYDFKAKRISFKKYGELDSFSSRRKLVGGKVYFSGMEVHLDTMELAIKMNGKVGKEAKFITLKILHNPKHADYELWALKGGVNSVKVVKVVRRLVRSQYKYYVQLTIEGEKPQKSRRLGKGNVGIDLGPTTVAVSGVNVVSIDKLASKCDDIQEEITRLSRRIDRSRRANNPQNFNENGTIKRGIKLVWNDSNRYKELRRELAELRRKQAAIRKQQHIERANALLKEGDTFIVENNPISSWTTRAKETKVNEKTGKIQKKKRFGKSVANHAPSMFVSILENKVKSLGGDLVKVDTKNAASQYDFTNNSFTKHELKERNVTLSNGDTHQRDMLAAFNLQHLQYDEKDDKQYDTEAMTADYERFCQLEQEEILRYKNKEKKDDRGTIGAEKL

SEQ ID NO: 3343 - protein, 1358 aa, unidentified
  REGION 1..1358: note = Description of Unknown: uncultivated organism sequence
  REGION 1..1358: note = Category: MG91 effectors
  REGION 1..1358: note = Description: MG91-535 effector
MEKEYYLGLDMGTNSVGWAVTDDAYNLIRFKGKDMWGIREFDEANPAVERRTHRTSRRREQRNAVRMGLIRSYFADEIQKVDSNFYQRLDNSFFHVEDKQDNVKDKNGIFNDKNYKDADYYKQYPTIFHLRKELIEDASQKDVRLVYLAVANMFKHRGHFLLSGIGSESSKQTITDLYNQVTGLITEEYGISLKTDIAGTDFEQVLCSREYSRTRKSEKVCEILEIKNSDKLKKAFVKSMCGLSVKITDIIDDTFTEISDEDKKITFSFVDSDYDEKAGVLEEKLGTDVYDIISKLKEIHDKAQVAEIMKNYQYLSFARVADYEKHKKDLKILKRVVKKYFEPTVYDKLFRSEENGTYSAYVNSFNSEEKSRRNYKERKQEDLYNSIKKLLKSVDNVDDTDIEYIKNEMDKENFLPKQLTFKNGVIPNQIHASELKAILKNAEKYLPFLNEKDESGYTVSERILMLFSFQIPYYVGPVSSNSNGWVKRLEPGQVLPWNIDKKIDLKETSEQFIQRMVRNCTYIAGEKVLPKDSLLYENFKVLNEINNLSINGERITVNLKQDLYNTLFLKGKRVTRKQIFNYFHSRGLVEEDSQISGIDIAVNNSLSTYGKFLPLFGEHLKEDKYKKMVDDIVFWCTVYGDSRKFLREQLEEKYSDVLDENQIKRITGMKFKDWGNLSKEFLELSGCCKSTGEVMPLIRAMWETNYNLMELLHSEEFTYSEELEEKQGKIEKVLSEYTIDDLNEEYFSAPVKRMVWQTLLIIKEIEKIMKCPPTRIFVEMTRKDDEKGDNGRKSSRKDQLLALYKKIQSEDKEWKKEMSSRIEDYDKKGALRSKKLYLYFIQKGLDMYTGKPIDLDNLMSANSNYDIDHIYPRHFVKDDNINNNLVLASKPANAEKSDIYPIKDSIYQKMKYTWKVLRDEGLITEEKYKRLTGRNPFTDEQKAGFIARQLVETGQGTKGVADLLTALLPDTKLVYSKAGNVSDFRKRYDIPKSRLINDFHHAHDAYLNIVVGNIYFTKFTSNPLNYIRKECSSKDNKYQYNLGNMYKWDVKRDGKTAWVAPEEGETGTLATVKKMLSRNTPILTRLTIEGHGGIADATLYSHKKAKQDTYIPLKSSDARMADVTKYGGYSSVTTAYLFLVEHEIKGKKIRTLETVPIYLKDRLENSKEKLEEYCRETLGYTNPSVRMKKIKLQSLIKLNGYYMQISGRTGNRFTLRNYVQLCLNGKWVDYIHKLEKYQDKGVIDDLITDERNVELYNVLCEKHSVGIFTLRPNLVGDKIKNGYDKFVNLTTEEQIKLLIEIIKLTCVGIVSANLTLIGGAAISGKMLMSKNITDANECILINQSVTGLYENRIDLLRV

SEQ ID NO: 3344 - protein, 1352 aa, unidentified
  REGION 1..1352: note = Description of Unknown: uncultivated organism sequence
  REGION 1..1352: note = Category: MG91 effectors
  REGION 1..1352: note = Description: MG91-536 effector
MTAFKYYLGLDMGTNSVGWAATDPEYRLLKAKGKDLWGIREFNEASGAVERRTHRISRRRRQREQVRIGILKDYFHDAICEVDPSFFRRLENSKYHEEDKDVEVRYKNNIFNDGNYTDKDYFNEYPTIYHLRNELISSTEKHDVRLVFLALLNMFKHRGHFLNAGLGENNGESNIDNAYFELTELLSELTEYHLSQDIDCKQIEAILSRRDMSRTHKAEELAGVLHVDLKNKPYKELIRGLCGLKFNACVVFPDVQSEEVTKLDICLSESTFDEKSDEIANIIGEDYFEIIMAMKEMFDIGSLASIMKGHNYLSQARVASYTKHKEDLKLLKEVIKKYCGKKEYDKFFNSDADGSYASYVGSYNSKNKERRVGNKRTSEELYKEIKKLLKDAQKEDENVQKILTSIENETFLPKQLTASNGVIPNQVHAREMKKILSNAENYLPFLTEKDETGLSVSERILKLFTFQIPYYIGPTSENSGKNGGNGWVVRREDGQVLPWNIDEKIDMKATSEAFISRMVRRCTYISGEQVLPKASLEYQSYCVLNEINNIKIDGERISVELKQDIYKAVFQKGKKVTKKQLCKYLHTRGIIETEEQVTGVDVSINNALTTYGKFKPIFGEDISKDSVQKMIEDIVFWCTVYGDSKKFLKDRIEEKYGNKLSEEQIKRILGFKFKDWGNLSKKFLELNGADTSTGESISIIRALWNNNLNLMELINSSLYNYKECLAEYQNTMLKTLSEIEAEDLNEYYFSAPVRRMIWQTILVIKELVKVLGCEPERIFVEMTRKPDEHKTRTSSRRNKFEELYKKVKDETTDWMQVIANAEEDGKIRSKKMYLYLTQKGRCMYTGKHIELDDLFDNNLYDIDHIYPRHFVKDDNIDNNLVLVCKEKNAHKSDHYPIEEEIFLSQKKMWLELRKSGFITEEKYNRLMDRNPFSDEQKAGFIARQLVETSQGTKGVANILRQLLPGSKIVYAKASNVSEFRHTRDGIPKSRLVNDFHHAHDAYLNIVVGNVYYMKFTQNPLNFIKKDYDNYKEDYNLSKMFDWDVKRNGEVAWIAQRKDGEAGTITTVKKMLSRNTPLMTRYSFEGKGGLANETLYSAKKAKGEGYIPFKSSDDKMQDVTKYGGFTSVTGAYFFLVEHTEKKKRIRTIESVPVYLAQKIEQNPDELKKYCEEILGLIDADIRLKKIKIGSLIKRNGYFCYITGKTGKQLIVRNAVNLCLKNEWIKYISKLEKVKEKDAVDKIITKEKNEVLYSELIQKFKHGIFSKRPNPVGDKLEKGSEKFSNLSIKEQCAVLCQILQLAAVLGSECDMTLLGESAHCGKMLISKKIGDEEIYLINQSITGLYEKKINLHTV

SEQ ID NO: 3345 - protein, 510 aa, unidentified
  REGION 1..510: note = Description of Unknown: uncultivated organism sequence
  REGION 1..510: note = Category: MG91 effectors
  REGION 1..510: note = Description: MG91-537 effector
MREQVLSYELTLPQRIYSHLDRLFSVFKNQVNSYIPRLWNEKGFELLSQKGSAMGILKEVFSTPQGLPSRVFRNVLELTGQIVRSQIKRKEIFESLLKGEEVTGYDENFLLNVKRQLEKLKKKGKEVNSYFDFPYPKFNGQVVITSADDNLEKGQFKRLRISGSFLEFSIKVPTQDGWKWIKVRKLLPNRLRKALLKAKKIEAPLIKKQRLKSGYTVYRLVIPLSFEVTEPKEIDRVLALDLSSQEKRLGVAVIMDKEFVSKPIFFKTELIRKVERIYKETCNLERKIDDVYNAIRNTGSRKVKQELAKRLNHLFGEQKRKQRKCKELRKQILENFTNFVIAHAKAYHCQVIAIENLAFKEVPNWQSSKALRLFTQWFYSRFTKRLEEKARVSGLKVLKINPANTSRICAKCGKEGRLEKLTFECSCGTYDRDYNASLNVAQRALRLTKSRAYTVRDIPGRIPSRLVRAEGLALLTVISLFKLLAWLKVVQTCYLKPQNLIRWINSDKYD

SEQ ID NO: 3346 - protein, 528 aa, unidentified
  REGION 1..528: note = Description of Unknown: uncultivated organism sequence
  REGION 1..528: note = Category: MG91 effectors
  REGION 1..528: note = Description: MG91-538 effector
MNEVFVLELPLQVEKYQADVLNKRYEQLRQLYNYVQGKLLRQYRYFEQMKEFQACKTIKEKRDFFRSHPFQINETLKGNKIPFMVSFDEYSIKGFVEKLAQKPVGANMTFADLGFTTYILDHLGASIWAAWDKMLYDFKAKRISFKKYGELDSFSSRRKLVGGKVYFSGMEVHLDTMELAIKMNGKVGKEAKFITLKILHNPNHADYELWALKGGVNSVKVVKVVRRLVRSQYKYYVQLTIEGEKPQKSRRLGKGNVGIDLGPTTVAVSGVNVVSIDKLASKCDNIQEEITQLSRKIDRSRRANNPQNFNEDGTIKRGIKLVWNDSNRYKELRRKLAELRRKQAAIRKQQHIERANALLKEGDTFIVENNPVDAWVRRAKETKVDEKTGKYKSKRGSGRSVGNHAPAMFVDILENKVKSLGGRFERVNTQNAASQYDFTTDSFKTGEEKHKLNERAITLSNGDTHQRDMLAAFNLQHLKLDEAKTKQYDTEAMAADYERFCQLEQEEILRYKNKVKKDDRGTIGAEKL

SEQ ID NO: 3347 - protein, 497 aa, unidentified
  REGION 1..497: note = Description of Unknown: uncultivated organism sequence
  REGION 1..497: note = Category: MG91 effectors
  REGION 1..497: note = Description: MG91-539 effector
MPSPTFIIELPIRVSDSESRTILRKLEFARQLHNATLGTALGKLQQLRQDSEWKRACLMPKGKERSELFRKLDRKYQLTEYDLHTVIAKHRQRSGRKTELGINETQKIATRVFQAVNRYKLGLGGRPRFKSLSRGLRSIEGKSNKTGLKFNIEKSVLSWCKHDYRVFIDPQDDFLQRALRSEGRSGFKKVKYCRLVRKTIKGKNRFYLQVVLEGQAPIKHIYASTSERLSIDPGPQTIAVFSDVWAGKIKVSPTAQVDEKRLRCIQRSMDRSLKKSNPDCYESDGTLRKGCVLKKTKGYEKRIQRLQECHRKAAATRRCEHGQLINLLLSMAGDIRVEKNQWKAFQRGHFGKSLGKSGISGFIERLKSKAESAGLKVTEVKPYKLKLSQYDPYTDQYRKKSLNERWHSLGESSEWIQRDVMSALLLQCADLEEEKHIPTEVIKTLEGVKQLLRDAGYVILKPSSNGESNPTFASEPKAVTPEKVRLEIFCGASDSYL

SEQ ID NO: 3348 - protein, 1353 aa, unidentified
  REGION 1..1353: note = Description of Unknown: uncultivated organism sequence
  REGION 1..1353: note = Category: MG91 effectors
  REGION 1..1353: note = Description: MG91-540 effector
MEQKTYYLGLDMGTNSVGWAVTDENYNLLRAKGKDLWGIREFESASGAIERRAHRVSRRNRQRQQVRVGKLNCYFEDAINEVDPNFYARLRNSKYHLEDKEEAVRTPNGIFNDPAYKDKDYYAQYPTIYHLRKELLTNDEPHDVRLVYLALLNMFKHRGHFLNAALTSEGTRHMQDAYNSFQENVYEMCDLSFPDVDGKEIEAVLSNRDLNRSRKSEALMELFHFTKKENKTELEFVKGMCGLTTEASKLFGDLGLEEKVEICFSKASYEDRIPDIMDAVGEENFRVLENLKEIADIGTLAGVLKGYTYLSEARVAEYEKHKSDLKLLKSVIRQYGTQEDYNKMFRSEESGTYSAYVNSYNSGKKQRRDMKGRTREDFYKSLKKLLKGMPEEDENVAQILAEIDKEKFLPKQLTASNGVIPNQVHLKEMKAILRNAEQYLPFLKEVDESGLTTSERIWRLFSFQIPYYVGPVTPNSSRDGGNGWVVRKEEGEVLPWNINEKIDLPATQDAFIKRLVRECTYISGEKVLPKGALIYEKFAVLNEINNIRIDNERLDTPLKQAIYNDLFCTGKRITRKKILDYLSAQGKLKNESQLTGIDKNINNSLSSYGKFLGVFGEDLKKDHYIDMSEDIIYWCTVYGDSKKVLRSLLEEKYQGELTEKQMKRILGFKFGDWGRMSREFLELEGIDKETGEVVTLIHAMWDNSMNMMELIHSDRFTFAESLESKKTKMDKTLSEFKHEDLDEYYFSAPVKRMIWQTLLVIKELEKVLGGPPTRLFVEMTRSDDVKGDKGRKKSRKDELLELYKKVKDESHDWTAIINAADENGTIRSKKMYLYLTQRGRCMYTGKPIDLNQLFDNNIYDIDHIYPRHFVKDDNLRNNLVLVDKRANARKSDNYPIESNIRCNDSIKALWYSLKKEKLISEEKYRRLTGSNPFSDEQKAGFIARQMVETSQATKGVNDLLKQLLPETELVYSKASNVSDFRRDYDLLKSRTINDFHHANDAYLNIVVGNVFLVKFTNNPRNFIKEYNRDKYTYGYNLGRIFERDVKRGDQVAWIADDRNGNHGTIETVKKMMAKHTPLLTRMNFVNNGQISKGTLYSKFKAKPDTYIPLKETDEKMRDISKYGGFTNVSTAYFFLVEHGKANKRIRTIEAVPIYMKSRLENNEEELKKYCVEQLGLLDPSIRLNKIKIQSQFRINGFYVFFRGKTGHELLWGNNTSLCLEPKWNNYISYLDKYAKNGYMNRFITKEENEHLYSELLKKHSEAIFSKRPNSFSKIVIAGQEKFKDLDIEKQCVALSQLISATSIGSSIADVTMIGGTAQTGRMRTNKKISGYELVLINTSATGLYKTEIDLNKI

SEQ ID NO: 3349 - protein, 530 aa, unidentified
  REGION 1..530: note = Description of Unknown: uncultivated organism sequence
  REGION 1..530: note = Category: MG91 effectors
  REGION 1..530: note = Description: MG91-541 effector
MTSPSFVIELPIAVDDAEMRTIVRKLEFARQLHNATLGTAMGQLQLMRQDAAWKEACVMPKGKERAAAFRALDRKYGLTEYDLHSVIARHREGTGRKAELGINETQKIATRVFQAINRYKLGLGGMPRFKSFKRGLHSIEGKTNKTGLKFKPEQKVLNWCGHDYRVLIDPKDNYIQRALKDNERSDQYRKIKYCRLVRRRIRSADRFFLQVVLEGTAPVKHVYAPVTERAAIDPGPQSIALFSKAFAGKIQVAGSNNFNEAASRRLLRAMDRSLRRNNPDAYNENGTIKKGAKLVKSKNYQRKVDRLREMHRVAAAERKCRHGQTINLLLSIAGDIRIEKNSWKAFQKGHFGKSLGKSAMSGFIAQLKSKAASAGLKVTEVNPYKLKLSQYDPYTDTYRKKDLSERWQEMKAGSGQYIQRDVLSALLLYCANIEKEIHIPKVAVEQLEGAKQFLTDAGYVVLKSTSSRDQRDPRLASEPKAMTPEMARQKILRGAGDSHLPTDQELGRIRAGGKVSTWSKETFPLQRGVV

SEQ ID NO: 3350 - protein, 530 aa, unidentified
  REGION 1..530: note = Description of Unknown: uncultivated organism sequence
  REGION 1..530: note = Category: MG91 effectors
  REGION 1..530: note = Description: MG91-542 effector
MTYQSFVIELPIAVDDAEMRTIVRKLEFARQLHNATLGTAMGQLQQMRQDAAWKEACVMPKGKERAAAFRALDRKYGLTEYDLHSVIARHREGSGRKAELGINETQKIATRVFQAINRYKLGLGGMPRFKSSKRGLHSIEGKTNKTGLKFRPEKKVLNWCGHDYRVLIDPKDDYIQRALKENERSDKYRKIKYCRLVRKRIRSSDRFFLQVVLEGTAPVKHVYAPVTKRAAIDPGPQSIALFSKAFAGKIQVAGSNNFNEAASRRLLRAMDRSLRRNNPDAYNENGTIKKGAKLVKSKNYQRKVDRLREMHRVAAAERKCRHGQTINLLLSIAGDIRIEKNSWKAFQRGHFGKSLGKSAMSGFIAQLKSKAASAGLKITEVNPYKLRLSQYDPYTDTYRKKDLSERWQEMKAGSGLYIQRDVLSALLLYCADIEKEIHIPKVAVEQLEGAKQFLTDAGYVVLKSTSSRDQRDPRLASEPKAMTPEMARQKILRGAGDSHLPTDQELGQIRAGGKVSTWSKETFPLQRGVV

SEQ ID NO: 3351 - protein, 607 aa, unidentified
  REGION 1..607: note = Description of Unknown: uncultivated organism sequence
  REGION 1..607: note = Category: MG91 effectors
  REGION 1..607: note = Description: MG91-543 effector
MAKEEFVLTLPLKVEKWQADILDKRYEMLRQVYNMVQQKLVRQYIYFSQQKAYRDCKNFEQRREFFANNPFHIKGVKGKNDELCDIKFPYTFKSRGGTSGKRVPNGISDYVSKLWSHKIGQDKTLADFGINSYIMEELGLHIMKAWEDRLYKPRSKRVSFKDYGEINSLGSRNKNGNIAGFTINLDEGYITYKTNGRLGQFADFIQLPIDFSREKNGYAKEALKGGIDSLKKLLIVKRCVRGENKYYLQLTISGEKPQKGRTLGKGNVGIDIGPSTIATSSLKGVHFDKLADKCDNIEHELYLINRKLDRSRRANNPQNYNEDGKIKRGIRLVWKKDKDVKRYATLKQQRKELYRKQAEIRKQQHLEMANAMLSQGDTFIVENNPVDAWVRRAKETTKTKTGKNRCKKRYGKSVANHAPSMFVSILKNKVLSLGGKFYEIDPRNAATQFDFTNGEFTKHEVCERSITLSNGCTHQRDMLSAFNLQHIVLQSKELKEYDIEQMKADYPIFCRLESSEQERFRIAWHNERDALYFVGASEKQMRRQPQEKSVANRHNGVVGRKYCNTSLEGENAKITGSGLVRESIERVSQIPDECHPFGGAPIVLDGL

SEQ ID NO: 3352 - protein, 601 aa, unidentified
  REGION 1..601: note = Description of Unknown: uncultivated organism sequence
  REGION 1..601: note = Category: MG91 effectors
  REGION 1..601: note = Description: MG91-544 effector
MIEEFVLTLPLKVEKWQADILNNRYEHLRRIYNMVQRKLLRQYIYYSQQSEYRKCKSNDEKRDFWENHPFTIKGIYDQKGNSSIVKFPYTYSSRSKNSGKRASNGISDLLPKLKHYNIGGGKTYGSLGLNASILENLGLSVQQAWEKRIYNSKSKHISFKKEDELNTFGCREKDGFSGFVLDLSKMELSFNTNGLHGKKAEFIHLPINPNKKFTQYEVEALKGGPESVRKIVISREYIRGAYKYYVQLTIRGEKPQKNRTLGKGTVGIDVGPSTVAVSSLYGVALNKLADKCDGIEHDLWLVNRKMDRSRRATNPDFFAEDGTYIKRKKGERRIWNFSNRYKNLKSVRRELYRRQAVVRKQQHIAMANEMLSQGDTFIVENNPVDSWTRRAKETKKNKKGKMRCKRRFGKSVAHHAPAMFVSILQNKVRSLGGEFHKVDIKIAATQFDFTNGEYKKHELKERTVTLADGKTHQRDMMAAFNLQHFRADSSEDYDIEQMILDYPVFCKLEEQGIANYIESKGEEKDTAYFAGKSSKELKRSSNRHNGGVERKHCNIHERKGDAAESGKKTLFGGISESLESVPDVPNECHHLGHQHLRLDEP

SEQ ID NO: 3353 - protein, 448 aa, unidentified
  REGION 1..448: note = Description of Unknown: uncultivated organism sequence
  REGION 1..448: note = Category: MG91 effectors
  REGION 1..448: note = Description: MG91-545 effector
MKTAATPSFVAELPLRVGADVEALLERTFDFARNLYNATLGTVLGRYQALRESQAWQLARAVPKKEAGEVFNRLMRQAELTKSGFEKILNKHRHSSGRAEQLDSNSGQKIADRLWDAFMRYRTRQGGKPRFKSERRGIHSIEGKTNTTGFRWKAQEGCVRWGKRRLPVIVNKQDDWLMRALADPVDPSKPRRVKCYRILWRKFGGRKRWFVQLVCEGVSPVKHIFAPTELKAGIDPSTKSMTVAYACGTVEKIDLATPLKKADREIRLLQRKLDRSRRATNKDNYNEDKTVKKGASGWVYSKHYEKIRTVYADAQRRAAAHRKCVCNEAVNWVLGQAGCIIVEKNNFKAFQKSRYGKSISKAAPGQFVTNLNVKAVSAGLKVFIVPPYELRPSQHDIETGQYVRHELCERWVKLGQSGLWLNRDALAALNLLWLDDAATRYSAARRSE

SEQ ID NO: 3354 - protein, 519 aa, unidentified
  REGION 1..519: note = Description of Unknown: uncultivated organism sequence
  REGION 1..519: note = Category: MG91 effectors
  REGION 1..519: note = Description: MG91-546 effector
MTSQTFILELPIKADDSQSRTIAKKFEYGRMLYNATLGSGLGRLTQMRQDPEWRRACEMSKGKERNELFRRLNRKYRLTEYDFHADIARHREGTKRKSELGINEAQKLATQAFSAVSRYMYKQGGRPRFKSFKRGLHSLEGKTNKTGLKFRPEKMLLDWCRKSYQVMLDSDDAFILDALYADKERTHFKRIKYNRIVCRNIKGVKRFYLQVVLEGTPPVKHAYAPATERMAIDPGPKSFAVFCPRVQAKVQVAPGAKVNEKAIRRIQRSMDRSLRASNPKAFDEKGRIKSGVGLTYSKGYQARVDKLREAHRRATGTRKCEHGELANLLLECAGNIRIEKNSWEAFKRSHFGRSINNSAASGFIQRLKSKAERAGLTVEEVSPYRLKPSQYDPYKDEFMKKALGERWMYLGDETTVIQRDIMSAILIYFADLKNQTHNPEVVKAALEGLKRGLTDAGYVKQLKLPRSSGSQDPLFAPEPKALTTEELRSKCFRAGSDRHSSTLNGTDGKAVGWSETFPL

SEQ ID NO: 3355 - protein, 1353 aa, unidentified
  REGION 1..1353: note = Description of Unknown: uncultivated organism sequence
  REGION 1..1353: note = Category: MG91 effectors
  REGION 1..1353: note = Description: MG91-547 effector
MEQKTYYLGLDMGTNSVGWAVTDENYNLLRAKGKDLWGIREFESASGAIERRAHRVSRRNRQRQQVRVGKLNCYFEDAINEVDPNFYARLRNSKYHLEDKEEAVRTPNGIFNDPDYKDKDYYAQYPTIYHLRKELLTNDEPHDVRLVYLALLNMFKHRGHFLNAALTSEGTRHMQDAYNSFQENVYEMCDLSFPDVDGKEIEAVLSNRDLNRSRKSEALMELFHFTKKENKTESEFVKGMCGLTTEASKLFGNLGLEEKVEICFSKASYEDRIPDIMDAVGEENFRVLENLKEIADIGTLAGVLKGYTYLSEARVAEYEKHKSDLKLLKSVIRQYGTQEDYNKMFRSEESGTYSAYVNSYNSGKKQRRDMKGRTREDFYKSLKKLLKGMPEEDENVTYILAEIDKEKFLPKHLTASNGVIPNQVHLKEMKTILRNAEQYLPFLKEVDESGLTTSERIWRLFSFQIPYYVGPVTPNSSRDGGNGWVVRKEEGEILPWNINEKIDLPATQDAFIKRLVRECTYISGEKVLPKGALIYEKFAVLNEINNIRIDNERLDTPLKQAIYNDLFCTGKRITRKKILDYLSAQGKLKNESQLTGIDKNINNSLSSYGKFLGVFGEDLKKDHYIDMSEDIIYWCTVYGDSKKVLRSLLEEKYQGELTEKQMKRILGFKFGDWGRMSREFLELEGIDKETGEVVTLIHAMWENSMNMMELIHSDRFTFAESLESKKTKMDKTLSKFKHEDLDEYYFSAPVKRMIWQTLLVIKELEKVLGGPPTRLFVEMTRSDDVKGDKGRKKSRKDELLDLYKKVKDESHDWSAIINAADENGTIRSKKMYLYLTQRGRCMYTGKPIDLNQLFDNNIYDIDHIYPRHFVKDDNLRNNLVLVDKRANARKSDNYPIDSNIRCNDSIKALWYSLKKEKLISEEKYRRLTGSNPFSDEQKAGFIARQMVETSQATKGVNDLLKQLLPETELVYSKASNVSDFRRDYNLLKSRTINDFHHANDAYLNIVVGNVFLVKFTNNPRNFIKEYNRDKYTYGYNLGKIFERDVKRGNEVAWIADDRNGNHGTIETVKKMMAKNTPLLTRMNFVNNGQITKGTLYSKSKAKQDTYIPLKESDEKMRDISKYGGFTNVSTAYFFLVEHGKANKRIRTIEAVPIYLKSRLENNDEALKNYCVEKLGLMDPSIRLDKIKIQSQFRVNGFYVFFRGKTGHRLIWGNNTSLCLEPKWNNYISYLEKFEKNGNMNRFVTKEENEHLYSELLKKHSQAIFSKRPNSFSKIVIAGQEKFKDFDIEKQCVALSQLISATSIGSSIADMTMIGGTARTGYMLTNQKISGYELVLINTSPTGLNKTEIDLNTI

SEQ ID NO: 3356 - protein, 514 aa, unidentified
  REGION 1..514: note = Description of Unknown: uncultivated organism sequence
  REGION 1..514: note = Category: MG91 effectors
  REGION 1..514: note = Description: MG91-548 effector
MNNETFIMELPLIVEKFQSDELDKRFEILRRIYNMAQNKLERQFCYLSKFKEYQECTTKKAKGEFIKKHPFSFKDILDKSGNPLMITFTKYDIQGYLSKFAKLKIDSQYTYSDMGINTPMLMHMGMAIWSAWEKVIFDSKADKISYKKYGDLKSIGVDWEPKHPAGFILDLQKGELKLNLNNRQGQYARYITMKIRFGRKEHQVWYEGDALNAGEDSIRVLTIVRRKIRGRYNYYLQMTIRNNKPQKGRTLGEGRVAIDLGTSKIAVVTKDKVHLLPLSPSILSISDELRIIQRQMDRSRRANNPQKFNEDGSIKKGNHDKWVNSKEYIRLRNMKAELERKQAAVRKQDHIALANYLLSLGNEFVIEDNDVQEWVKRKKEEKRRKSDGKNLSKAGLGKQVGNHAPSMFVTILKNKVESLGGTFVRVDNNNRATDYDFTNNTFNEHKLEERYITLGNGNRHQRDTLAAFNLYHLDTAPEKEKCYHLYEMRKHYAQFCESEKEALLRWKGMTPKRE

SEQ ID NO: 3357 - protein, 422 aa, unidentified
  REGION 1..422: note = Description of Unknown: uncultivated organism sequence
  REGION 1..422: note = Category: MG91 effectors
  REGION 1..422: note = Description: MG91-549 effector
MERHLYNGGSPRFISSRRGLHSIEGKTNRTGIIWKADQQCVTVCKRVYRVRVDKRDDWLTRALQDPTDPTKPRRVKYCRIVREMRKGKERFLLQLVAEGTSPLKHAYAGKDLRMAIDPGLGSLTYATEDGTIAKVQIAPSADTDHRAVRKLQRAMERSRQATNPDNYETVEVVRHGKKHKSLKVKSGRLQWRFSKRYESLRAELAEIFRLSAATRKREHGEVCNWLLGHAGHIIVEDNSYKAFQRGRFGKTIGRHAPAALYAQLTNKAESAGLLVEVVSPKKLKPTQHNLLTGQFVKHELWERRVRLGNDDDDRWIDRDAAACLNLLYADLEKQTYAPERIREAVLAGVTAWLDAGVVVIQAREGITEREFGRFRRRGIPSLTVQGLRQQGFRGRSDSKSGTTPRRKASTVSKPSHFSGEVV

SEQ ID NO: 3358 - protein, 524 aa, unidentified
  REGION 1..524: note = Description of Unknown: uncultivated organism sequence
  REGION 1..524: note = Category: MG91 effectors
  REGION 1..524: note = Description: MG91-550 effector
MNEVFVLELPLQVEKYQADILNKRYEQLRQLYNYVQGKLLRQYRYFEQMKEYQACKTIKEKRDFFKSHPFQINETLKGNKTPFTVSFDEYSIKGFIEKLVQKQVGPNMTYADLGFTTYILDHLGASVWAAWDKKLYDFKAKRISFKKYGELDSFSSRRKVVGGKVYFSGMELHLDTMELSIKMNGKQGNNAKFITLKMLHNPKHAEYEIWALKGGVDSVKVVKVVRRLVRTQYKYYVQLTIEGEKPQKGRTLGKGNVGIDLGPTTVAVSGEHIVSIDKLASKCDNIQEEITRLSRKIDRSRRANNPQNFNEDGTIKRGIKLVWNDSKRYKEMRRELAELRRKQAAIRKQQHIERANALLKEGDTFIVENNQISSWTTRAKETKVNEKTGKIQKKKRFGKSVANHAPSMFVSILENKVKSLGGEVVKVDTKNAASQYDFTDNSFTKHELKERNVTLSNGDTHQRDMLAAFNLQHLKYNEPEAKQYDTEAMVADYDRFCQLEQEEIQRYKNKEKKDDRSTVGAEKL

SEQ ID NO: 3359 - protein, 607 aa, unidentified
  REGION 1..607: note = Description of Unknown: uncultivated organism sequence
  REGION 1..607: note = Category: MG91 effectors
  REGION 1..607: note = Description: MG91-551 effector
MIEEFVLTLPLKVETWQADILNKRYEHLRCIYNMVQRKLLRHYIYLSQQNEYRQCKDNDEKRTFWENHPITFKDFCDKNGNPAIVKFPYTYSHRSKDSGKKASNGISDFVPKFKNRNIGGGLTYGSLGINASILENLGLRIEQAWKKRLYDPKSKHISFKEEGDLNTLGCREKDGFSGFVLDLQKMMLSFNTNGRRHGSAEYIHLPIKPSKLTKYEKFVIDALKDKLSSVRKIVVAREYVRGKYKYYVQLTIKGEKPQKNRTLGKGTVGIDVGPSTVAVSSLQGVSLDKLADKCDNIEHDLWHINRKMDRSKRDTNPDFFNEDKTYKKPEKGERRKWTFSNRYKRLKLERRELYRKQAAIRKQQHIEMANALLSQGDEFIVENNPIDSWAKRAKETKRGKNGKIRCKRRFGKSVAHHAPAMFVSILQNKVRSLGGSFHKVEIKNAATQFDFTNGEFTKHELNERTVTLSNGRTHQRDMLSAFNLQHLRPDSEETKNYNIEQMEADYPVFCKLEEKGIAQFKEKRQQERDVAYFTGVSHKTLKFSSANRHNGGVGRGNCNYHAGSKRNVAKTGNKSSSKENCESMETVSLVPNEYHHSNHQHLRLDGL

SEQ ID NO: 3360 - protein, 342 aa, unidentified
  REGION 1..342: note = Description of Unknown: uncultivated organism sequence
  REGION 1..342: note = Category: MG91 effectors
  REGION 1..342: note = Description: MG91-552 effector
MRAAFSFCAIAETLGSEIVVENDNVTVKPNNARSKEILQACVIDGLKIQYDEMRHWIKELYPSLMSSCTSKIGYVIGKMMTMKDQDIKKCQKKFLIVNGKRAFAQFNRSGIPLKSGMAKIDGHLLKCRWDKDIGEVEFTTNKMDSSTYYAFSSLREARDGWNIKDSYLSFDEDKNKIIVILSYERPDTPSKVNADKVMYVEFTDDKEKFITCYTDNKWSARPFSAAGIVGYLEEMERIYSRYWSEFKSYERREIKQRKHVKEKLNRYTERRANAEKNNNHLWSKRIVDFSRQQCAGKLFVVNLPEKTLFDLPYGWFDLKTKLDYKMKEIGGTVSFVSVDKDK

SEQ ID NO: 3361 - protein, 537 aa, unidentified
  REGION 1..537: note = Description of Unknown: uncultivated organism sequence
  REGION 1..537: note = Category: MG91 effectors
  REGION 1..537: note = Description: MG91-553 effector
MSTKSFIISLPIITGDQDRRRLQKSFSFGCNLQNAVMGGGWDRVLKMRATAEWQTARAMPKSSERTKAFRDLRVHFRLSEYDFHADVAKHRKASGRCHLLGINESQKLASRAWISVERHLYNGGSPRFISSRRGLHSIEGKTNRTGIIWKADQQCVTVCKRVYRVRVDKRDDWLTRALQDQTDPTKPRKVKYCRIVREMRKGKERFLLQLVAEGTSPLKHAYAGKDLRMAIDPGLGSLTYATEDGTIAKVQIAPSADTDHRAVRKLQRAMERSRQATNPDNYETVEVVRHGKKHKSLKVKSGRLQWRFSKRYESLRAELAEIFRLSAATRKREHGEVCNWLLGHAGHIIVEDNSYKAFQRGRFGKTIGRHAPAALYAQLTNKAESAGLLVEVVSPKKLKPTQHNLLTGQFVKHELWERRVRLGNDDDGRWIDRDAAACLNLLYADLEKQTYAPERICEAVLAGVTAWLDAGVVVIQAREGITEREFGRFRRRGIPSLTVQGLRQQGFRGRSDSKSGTTPRRKASTVSKPSHFSGEVV

SEQ ID NO: 3362 - protein, 484 aa, unidentified
  REGION 1..484: note = Description of Unknown: uncultivated organism sequence
  REGION 1..484: note = Category: MG91 effectors
  REGION 1..484: note = Description: MG91-554 effector
MAHKENQKAFVVTFPLHTEKWQEDRIDKMMRMLTTFYNDRQRKLVRRYIYLSHSKAYKEAKGKGVVAFKNYMKENGFSQYGLDAFFKADTKGALYQCGLNSMFLQYLSQCAWSAWDKKLFGKGDFVKTDKVVNIFCSRNMKGRFCGFDYDLSTFTIRIKSTCTKKIICTIPFVVNKNSEYELYALSQKICRIGIVRKLIRSKYKYYVQFTFDGVPYNKGRNIGTGIVGIDPGPSKIAIVSDEKVEIAKLAPGIEEDERKTARLRRKLDRSRRATNPHMYKEDGTIIKGQRQTYFSKVYNETRKQLADAQRKLAAKRKIAHNELANTLLEYGDTFKVEANSYKSMQARTKATSMTKSGRIRSKKRYGKSINNRAPSEFLVILKNKLLYYPKGKYYDVPSSYACTQFDFTNESFTEHKISERRIVTSDGIQHNRDTLAAFNIKNAIVNDTSTKKKKITKSKEFFDIVKMKASYNEFCVKERYLLSV

SEQ ID NO: 3363 - protein, 634 aa, unidentified
  REGION 1..634: note = Description of Unknown: uncultivated organism sequence
  REGION 1..634: note = Category: MG91 effectors
  REGION 1..634: note = Description: MG91-555 effector
MPVTSQSFVIELPIAVDDAEMRTIVRKLEFARQLHNATLGTAMGQLQQMRQDAAWKEACVMPKGKERAAAFRALDRKYGLTEYDLHSVIARHREGSGRKAELGINETQKIATRVFQAINRYKLGLGGMPRFKSSKRGLHSIEGKTNKTGLKFRQEKKVLNWCGHDYRVLIDPKDNYVQRALKENERSDQYRKIKYCRLVRKRIRSADRFFLQVVIEGTAPVKHVYAPVTERAAIDPGPQSITLFSKAFAGKIQVAGSNNFNEAVSRRLLRAMDRSLRRNNPDAYNEDGTINKGAKLAKSKNYQRKVDQLHEMHRVAAARRKCLHGQTINLLLSIAGDIRIEKNSWKAFQRGHFGKSLGKSAMSGFIAQLKSKAASAGLKVTEVNPYKLKLSQYDPYTDTYRKKDLSERWQEMKAGSGQYIQRDVLSALLLYCADIEKEIHIPKVAVEQLEGAKQFLTDAGYVVLKSTSSRDQRDPRLASEPKAMTPEMARQKILRGAGDSHLPTDQELGQIRAGGKVSTWSKETFPLQRGVVQKFDDRSEGLDMQTVYLSAGYTMGPHYFAGSIGWLNAELNGSAEGYPQDDGAAFLGALVYYYSLSKRTQLYAFTSFVDGKQLLDAGTDFNQTTGGFGLMHKF

SEQ ID NO: 3364 - protein, 532 aa, unidentified
  REGION 1..532: note = Description of Unknown: uncultivated organism sequence
  REGION 1..532: note = Category: MG91 effectors
  REGION 1..532: note = Description: MG91-556 effector
MSTKSFIINLPIITGDQDRRRLRKSFSFGCNLQNAVMGGGWDRVLWMRATPEWQAARVMPKGSERTKAFRDLRVQFRLSEYDFHADVAKHRKASGRSHLLGINESQKLASRAWISVERHLYNSGSPRFISSRRGLHSIEGKTNRTGIIWKADQQCVTVCKHVYRVRVDKCDDWLTRALQEPTDPTKPRKVKYCRIVREMRKGKERFLLQLVAEGTSPLKHAYAGKDQRMAIDPGLGSLTYATEDGKIAKVQIAPNADTDHRAVRRIQRAMERSRQATNPDNYETVDVVRHGKKRQSLKVKSGRLEWRFSKRYEKLRAELAQTHRLAAATRKREHGEVCNWLLGHAGTIIVEDNSFKAFQRGQFGKSIGRHAPAAFYTQLTSKAESAGLQVKVVSPKKLKPTQHNLLTGRFVKHELWERRVQLGDRTGVCWIDRDAAACVNLLYADLDQQIYDPKRIREAVLAGVTAWLDAGVVVIQAREGITEREFRRFRRRGIPSLAVQGLRQKGFRGRSDSKSGAIPEAKSLGYIETFPL

SEQ ID NO: 3365 - protein, 1358 aa, unidentified
  REGION 1..1358: note = Description of Unknown: uncultivated organism sequence
  REGION 1..1358: note = Category: MG91 effectors
  REGION 1..1358: note = Description: MG91-557 effector
MEKEYYLGLDMGTNSVGWAVTDDAYNLIRFKGKDMWGIREFDEANPAVERRTHRTSRRREQRNAVRMGLIRSYFADEIQKVDSNFYQRLDNSFFHVEDKQDNVKDKNGIFNDKNYKDADYYKQYPTIFHLRKELIEDASQKDVRLVYLAVANMFKHRGHFLLSGIGSESSKQTITDLYNQVSGLITEEYGISLKTDIAGTDFEQVLCSREYSRTRKSEKVCEILEIKNSDKLKKAFVKSMCGLSVKITDVIDDTFTEISDEDKKITFSFVDSDYDEKAGVLEEKLGTDVYDIISKLKEIHDKAQVAEIMKNYQYLSFARVADYEKHKKDLKILKRVVKKYFEPTVYDKLFRSGENGTYSAYVNSFNSGEKSRRNYKERKQEDLYNSIKKLLKSIDNVCDTDIEYIKNEIEKENFLPKQLTFKNGVIPNQIHASELKAILKNAEKYLPFLNEKDESGYTVSERILMLFSFQIPYYVGPVSSNSNGWVKRLEPGQVLPWNIDKKIDLKETSEQFIQRMVRNCTYIAGEKVLPKASLLYENFKVLNEINNLSINGERIAVALKQDLYNTLFLKGKRVTRKQIFNYFHSRGLVEEDSQISGIDIAVNNSLSTYGKFLPLFGEHLKEDKYKKMVDDIVFWCTVYGDSRKFLREQLEEKYSDVLDENQIKRITGMKFKDWGNLSKEFLELSGCCKSTGEMIPLIRAMWETNYNLMELLHSEEFTYSEELEEKQGKIEKVLSEYTIDDLNEEYFSAPVKRMVWQTLLIIKEIEKIMKCPPTRIFVEMTRKDDEKGDNGRKSSRKDQLLALYKKIQSEDKEWKKEMSSRIEDYDKNGALRSKKLYLYFIQKGLDMYTGKPIDLDNLMSANSNYDIDHIYPRHFVKDDNINNNLVLASKPANAEKSDIYPIKDSIYQKMKYTWKVLRDEGLITEEKYKRLTGRNPFTDEQKAGFIARQLVETGQGTKGVADLLTALLPDTKLVYSKAGNVSDFRKKYDIPKSRLINDFHHAHDAYLNIVVGNIYFTKFTSNPLNYIRKECSSKDNKYQYNLGNMYKWDVKRDGKTAWIAAKEGETGTLATVKKMLSRNTPILTRLAIEGHGGIADATLYSHKKAKQDAYIPLKSSDARMADVTKYGGYSSVTTAYLFLVEHEIKGKKIRTLETVPLYLKDRLENSKEKLEEYCRETLGYTNPSVRMKKIKLQSLIKLNGYYMQISGKTNKQFTVRNYVQFCLNSKWVDYIHKLEKYQDKGVIDDAITDEKNVELYNVLCEKHSVGIFTLRPNPVGDKIKKGYDKFVNLTTEEQIKLLIEIIKLTCVGIVSANLTLIGGASISGKMLISKNITDAKECLLINQSVTGLYENRIDLLRV

SEQ ID NO: 3366 - protein, 1356 aa, unidentified
  REGION 1..1356: note = Description of Unknown: uncultivated organism sequence
  REGION 1..1356: note = Category: MG91 effectors
  REGION 1..1356: note = Description: MG91-558 effector
MGRDYYLGLDMGTSSVGWAVTDEKYNLLRAKGKDLWGIREFEEAEGGIARRQNRISRRRRQREQVRIGLLKSYFAEEIEKGDPDFLQRLENSKYHLSDKDEKVRYKSAIFNDPEYTDKDYYRDYPTIFHLRAELIHNQEPHDIRLVYLALLNMFKHRGHFLNASLSAEEETQSMSDAYTAFRALVEEVMTANETENLFFPDGKADEIEAIISSRDYNRKRKSELMTEMLGFTKKDKAAQALIKGMCGLTVDVKTVFREIESEAKLSISFSDSNYDEKIVEIQEVLDDEQLELLEAVKTIYDIGSLAGVLKGEKYLSDARITDYNKHKEDLALLKKIIRKYTDQKTYNDLFRGTEPGSYSAYVNSTNSGKKQRRNMGGNAKRNQEAFYASLKKLLNKLPSEDDDVQKILADIDKELFLPKQLTFANGVIPNQVHAREMKAILNNAEQYLPFLTEKDESGLTVSERILKLFSFQIPYYVGPVTTKSSRDGGNGWVVRKESGQVLPWNIEDKIDMDATSKKFIENLIRECTYIAGEKVLPKGSLLYERYCVLNEINNIKIDGRPIDVELKQKIFEDKFMSGKKVTRKQLVTYLHGKGVLEDDAQLTGIDKTINNSLSSYGKFLGVFGDELKKDSCQIMVEDIIRDCTIYGDSKKRLRETLQKKYVDNNNLSESQLKRILGFKFKDWGRMSKEFLEMQGINRETGEVMSLVQAMWETNLNLMELIYSEDFTFAEALQEKQAKDYLTLSEFKFEDLDEYYFSAPVKRMVWQTLLIIKELEKVLGAPPKKVFIEMTRSDGVKGDRGRTISRKKQFEDLYKKIKDESQDWASIIDNADASGKLRSKKMYLYLTQMGKCMYTGKPIDLDDLFDDNKYDIDHIYPRHYVKDDNLGNNLVLVEKKANASKGDRYPLDTDIRGKMHGTWKFLKEKGLITEEKYRRLTGSNPFSEEQQADFIARQLVQTSQGTKGVADLLKQLLPDAKIAYSKASNVSDFRRDYDLPKSRLINDFHHANDAYLNIVVGNAYLVKFTQNPLNYIRSGDVQYNLGRMFEKDIVRNGEVAWLADDGKGNHGTIVTVKKVMARNTPMMTRMVLNGHGAIANATLYPASKASADNYIPLKGSDSKIADVTKYGGFTSVSTSRFVLVEHLVKKERIRTLEALPILVANSCKTMEDIENYCEEELGLIAPKVKLDGIKIQSLLKINGFYVHLSGKTNKQLALRNAVNLCLDAKWKEYIHYLEKASNNGNYGNPICSDMNIELYSILAEKHSSSIFAKRPNPVGTKLVKEKETFSKLELVDQVSVLLQILQLSAIGITQADLRAIGGAGIAGKMLISKDISKQEEALLIMQSPTGLYESTIDLKTI

SEQ ID NO: 3367 - protein, 530 aa, unidentified
  REGION 1..530: note = Description of Unknown: uncultivated organism sequence
  REGION 1..530: note = Category: MG91 effectors
  REGION 1..530: note = Description: MG91-559 effector
MKNSSIIVSYEITLPQRIYPHLDRLFSVFGRNVRYFIDKLWNDDTLKLINQNGYAVSILKEIIQKPKDLPSRVFRNVLELSGQILRSQIERRRLFDKLIQKPCILIQSDREIAKFLNTSIPFALNVKRQVLKVLKKGEKRDYLSLIKPSFSNTVVITSADDNLKNGQFKKLKIDKNKLTLELKVPVGNNWEWIKVEKFLTNRLKKALKNAKEVKAPLIKKVDLKSGFSVYRLVIPIEIQTKVKDKVERIFALDLSSSEKRLGVGVIVDKEGHSKPVFFNAFKMVRKLERLYKEISSLERKIDHIADGLHSTVKKKHRERLYIRLRHLYQEQKLRWRKFKELRKQILETFTNLIIAHTKAYSCDAITIEDLKFQDLPEWKNRRFRRLFSTWFYSRFENRLRHKAQREGIKILTVNPFNTSQVCHRCGSKCKADRLEFKCESCGKHFDRDYNASVNIGMKALNLACKTKSKSYMDKDTPARFPSLQVLTRYKFKSLLTFLPLLKLIAYLRLVETSYLKLKNLFKYVNSDKYG

SEQ ID NO: 3368 - protein, 525 aa, unidentified
  REGION 1..525: note = Description of Unknown: uncultivated organism sequence
  REGION 1..525: note = Category: MG91 effectors
  REGION 1..525: note = Description: MG91-560 effector
MNEVFVLELPLQVEKYQADILNKRYEQLRQLYNYVQGKLLRQYRYFEQMKEYQACKTFKEKKDFFRSHPFHINGVFGSNKKLFNITFDEYGINGFVEKLGKKQVSTGVTYADLGITSTLLDRLSLAIWAAWDKMLYNYHAQRVSFKKRGELNIFGSRKKTNGSGKKMFSGMELHLDKMEVAIKLNGKVGKAAKFMTLPILPNPKHTDYEMWALKGGFDSVTVITIVRRLVRSQYKYYVQLTIEGEKPQKGRTLGKGRVGIDLGPTTVAISGENIVSIDKLAAKCDNIQEEITRLSRKIDRSRRANNPQNFNEDGTIKRGIKLVWNDSKRYKELRRELAELLRKQAAIRKQQHIDRANALLKEGDTFIVENNQISGWTTRAKETKVNEKTGKIQKKKRFGKSVANHAPSMFVSILENKVKSLGGEVVKVDTKNAASQYDFTDGSFTKHELKERNVTLSNGNTHQRDMLAAFNLQHLKYNEPEAKQYDTEAMAADYERFCQLEQEEIQRYKNKEKKDDRGTIGAEKL

SEQ ID NO: 3369 - protein, 632 aa, unidentified
  REGION 1..632: note = Description of Unknown: uncultivated organism sequence
  REGION 1..632: note = Category: MG91 effectors
  REGION 1..632: note = Description: MG91-561 effector
MTSQSFVIELPIAVDDAEMRTIVRKLEFARQLHNATLGTAIGQLQQMRQDTAWKQACAMPKGKERTAAFRALDRKYGLTEYDLHSVIARHREGSGRKAELGINETQKIATRVFQAINRYKLGLGGMPRFKSSKRGLHSIEGKTNKTGLKFRQEKKVLNWCGHDYRVLIDPKDNYVQRALKENERSDQYRKIKYCRLVRKRIRSADRFFLQVVIEGTAPVKHVYAPVTERAAIDPGPQSITLFSKAFAGKIQVAGSNNFNEAVSRRLLRAMDRSLRRNNPDAYNEDGTINKGAKLAKSKNYQRKVDQLHEMHRVAAAQRKCRHGQTINLLLSIAGDIRIEKNSWKAFQRGHFGKSLGKSAMSGFIAQLKSKAASAGLKVTEVNPYKLKLSQYDPYTDTYRKKDLSERWQEMKAGSGQYIQRDVLSALLLYCADIEKEIHIPKVAVEQLEGAKQFLTDAGYVVLKSTSSRDQRDPRLASEPKAMTPEMARQKILRGAGDSHLPTDQELGQIRAGGKVSTWSKETFPLQRGVVQKFDDRSEGLDMQTVYLSAGYTMGPHYFAGSIGWLNAELNGSAEGYPQDDGAAFLGALVYYYSLSKRTQLYAFTSFVDGKQLLDAGTDFNQTTGGFGLMHKF

SEQ ID NO: 3370 - protein, 413 aa, unidentified
  REGION 1..413: note = Description of Unknown: uncultivated organism sequence
  REGION 1..413: note = Category: MG91 effectors
  REGION 1..413: note = Description: MG91-562 effector
MKENGFSQYGLDAFFKADTKGALYQCGLNSMFLQYLSQCAWSAWDKKLFGKGDFVKTDKVVNIFCSRNKKERFCGFDYDLSTFTISIQSTCTKKIICTIPFVVNKKSDYELFALSQRICRIGIVRKLIRGKYKYYVQFTFDGVPYHKGRNIGTGIVGIDPGPSKIAIVGDNKVEIAKLAPNIEEDERKTARLKRKLDRSRRATNPHMYKEDGTIIKGQRQTCFSKVYNETRKQLADAQRKLAAKRKIAHNELANTLLEYGDTFKVEANSYKSMQARAKATSMTKSGRIRSKKRYGKSINNRAPSEFLVILKNKLLYYPKGKYYDVPSSYACTQFDFTNESFTEHKISERRIVTSDGIQHNRDTLAAFNIKNAIVNDTSTKKKKVTKSKEFFDIVRMKASYNEFCLMERYLLSV

SEQ ID NO: 3371 - protein, 534 aa, unidentified
  REGION 1..534: note = Description of Unknown: uncultivated organism sequence
  REGION 1..534: note = Category: MG91 effectors
  REGION 1..534: note = Description: MG91-563 effector
MRTNSLILSYELTLPQRIYPKLDRLFSVFKWKVRDLISDLWNEKGFKLLKEKGSAWGILKNVIERPLNLPSRVHRNILELSGQIIRSHLERKRIFDYIIEKPYRVLCDEKDIAKDLNTSSLFVLNVQNQIKNLLQKEKEKKDYFSVIEPSFSGNVIITSADDNLEKGQFRRLKIQRNKITFEIKVPTFEGWEWIRVVKFIPDKLRKVLSRAKDIKAPLIKRVFLKSGFTIYRLVIPVEIEVKVEERIERVFAIDLSPSEKRLGVGVVVSESGYSKPVFFSAYKKIKKLERLYREISNLERKIDNIGDQIHGTLKREHRERLYQRLEHLFEEQKLRWRKFKELREQILEIFVNFVIEHAKGYCCDAIVIEKLEFKGLPAWNNKRFRRLFSLWFYSEFSKRLEHKALRNGLRVIKVDFHRNSKICHICGSEGRVNKLEFYCPKCQRRFDRDYNGAVNIGMKALMVCRTKPKPYMGKGIPVRVPFPQVPTHSILPFKFKALLFTISFLRLLSYLRVVETSYLKFGRLTGLVGSDKYG

SEQ ID NO: 3372 - protein, 534 aa, unidentified
  REGION 1..534: note = Description of Unknown: uncultivated organism sequence
  REGION 1..534: note = Category: MG91 effectors
  REGION 1..534: note = Description: MG91-564 effector
METNSLILSYELTLPQRIYPKLDRLFSVFKWKIRDLISELWNEEGFKLLKEKKSACSILKSIIERPPGIPSRVYRNILELSGQIIRSHLERKRIFDYIIEKPCRVLCDEKDIAKDLNTSSLFVLNVQNQIKNLLQKEKEKKDYFSVIEPSFSGNVIITSADDNLEKGQFRRLKIEGNKITFEIKVPASEGWEWIKVKKFIPDKLRKVLSRAKDIKAPLIKRVFLKSGFTIYRLVVPVEIEVKVEKRIERVFAIDLSPSEKRLGVGVVVFESGYSKPVFFSAYKKVRKLERIYKEISNLERKIDNIANQIHSTFKKKHKAQLYQRLKHLYQEQKLRWRKFKELREQILEIFVNFVIEHARGYGCDAIVVEKLEFKNLPTWNNKRFRRLFSLWFYSRFSKRLEHKALRNGLRVIKVDSCGNSKICHICGFEGRINKLEFYCPKCQKRFDRDYNGAVNIGIKALRVCRTKPKPYKGKGIPVRVPFPQVPTHSILPFKFKALLFTISFLKLLSYLRVVETSYLKFGRLTGLVGSDKYG

SEQ ID NO: 3373 - protein, 1371 aa, unidentified
  REGION 1..1371: note = Description of Unknown: uncultivated organism sequence
  REGION 1..1371: note = Category: MG91 effectors
  REGION 1..1371: note = Description: MG91-565 effector
MSQLENNVTKSGYYLGLDMGTDSVGWAVTDDKYNILRAKGKDLWGMREFEEAQTAADRRSHRTSRRRYQREVVRIGLLKDYFHDAIAKVDPLFYQRLENSAYFLEDKDECVRNKNGIFNDKNYTDRDYYRKYPTIFHLRMELINNPEPHDVRLIYLALLQMFKHRGHFLNASLGNEGNEKEFSDLLREMGNTLADITGTSLADNVVAKDVELVLSKRELSRTGKSERLAELFSITKKDKVQFECIKGICGLSIDARKIFEPLENEDKKIEICFSSSGYDEKITDIQGAVGDENYALIEIMKSVYDAGMLAGIMKGKHYLSEARIEDFEKHKKDLSVLKKVIKKYKTDEYDSLFRSEANGSYSAYVDSFNSGVKQRRDMKERKKEDFYKTVKTLIKDMPSDDKDIKYINNEIECDNFMPKQMTSSNGVIPNQVHLFEMKKILGNAESFISFLKEKDESGYSVAERIIKLFAFQIPYYVGPVSEDSGRNGGNGWVVRKEKGKVLPWNIDEKIDMRKTSEQFISRLVRKCTYISGENVLPKESLEYQKYALLNEINVISVDGERISTELKQKMYKELFMSGKSVTRKKIVSYLHNEGILSDETQLSGIDEKVNSNLSSYSKFKSVFGDKIDQDRYQEIAEQIIFWCTVYGDDKKYLSEQLEEKYKDELTDDQIKRITGFKFKDWGKMSKAFLELPGCDKEDGEVVPLVRMMWNTNHNMMELINSEEYTYKDELFAKQRRAINCISELKLEDLDEMYFSAPVKRMVWQTLQIITELEKVMGTAPTKVFVEMTRKHDDNKKRTQTRKDKFLDLYRSVKNDEHNWSQIINTADSDGTIRSKKMYLYLTQKGRCMYTGRPIDLDRLFDDNLYDIDHIYPRHYVKDDNIDNNMVLVEKEKNAHKSDIYPVESSIFSNCVNMWKELYNGKFISEEKFKRLTGREPFNDEQKAGFIARQLVETSQGTKGVSDIIKEALPDETRIIYSKASNVSEFRQEFTIPKSRLINDFHHAHDAYLNIVVGNVYETKFTQNPMNFIKTDYRKDQERNKYNLSRMFDWNVSRGLYTAWTASINSKKNRIDHNIENESGTICTVRKMLKKTTPILTRLSYVGQGGLANATVYSAKKASAGKGYLPLKTEGRLSDVSKYGGVTNASVEYFFLVEYEEKGKKICSLETVPVYMAGKVGKDKVKLEEYCRDILHLSNPSVRVPQIKLASLVKVDGYLLHITGKTGNQICLRNAVNLCEDVETVRYLKKLENSENKGYLEEEITEDENIKLYQNFMDKHINSIFRLRPNPVGDKLLEGFDRFKSLSVEEQTKVLLQMLNLTGIVAGCAADLTAIGESKATGKMLIPQKIIKFKEIKLINQSVTGLYDKSIDLLTV

SEQ ID NO: 3374 - protein, 510 aa, unidentified
  REGION 1..510: note = Description of Unknown: uncultivated organism sequence
  REGION 1..510: note = Category: MG91 effectors
  REGION 1..510: note = Description: MG91-566 effector
MRKKTTDENFIMELPLTVEKFQSDELDKRFELMRRIYNSAQNKLKRQYEYLSSFKAYKECKTKKEKGDFLKSHSFSFKGVLDKGGEPLKITFSEYDLKSYLSKFAKIKVDSQYTYSDYGINTSMLMHMAMAIWSAWKKVLYDPKAQEVSFKKHGELQSIGVDWEPKHPAGLILDLQKGELKVNLNNRQGHYARYITMKIKFGRKERQAWYEGDALNAGEDSIRGLTIVRRKIRGKYNYFLQMTIRNNKPQKGRTLGTGRVAIDLGTCKVAVVTKDSVRLIPLAPNISSYSEELRIIQRQMDRSRRANNPQKYHEDGTIKKGNHDKWVSSKEYIRLRDIKAELERKQAAVRKQDHIALANYLLSLGNEFVIENNDVQEWAKRKKEEKRREKDGKILSKAGLGKQIGNHSPAMFVTILKNKVESLGGSFIKVDTDNGATDYDFTNDEFTHHELEERYITLSDGKRHQRDTLAAFNLYHIDTTQNRVYDRLAMQRHYAWFCEREAEAVERFKR

SEQ ID NO: 3375 - protein, 530 aa, unidentified
  REGION 1..530: note = Description of Unknown: uncultivated organism sequence
  REGION 1..530: note = Category: MG91 effectors
  REGION 1..530: note = Description: MG91-567 effector
MTSQSFVIELPIAVDDAEMRTIVRKLEFARQLHNATLGTAMGQLQQMRQDAAWKEACVMPKGKERAAAFRALDRKYGLTEYDLHSVIARHREGSGRKAELGINETQKIATRVFQAINRFKLGLGGMPRFKSSKRGLHSIEGKTNKTGLKFRPEKKVLNWCGHDYRVLIDPKDDYIQRALKENERSDQYRKIKYCRLVRKRIRSSDRFFLQVVLEGTAPVKHVYAPVTERAAIDPGPQSIALFSKAFAGKIQVAGSNNFNEAASRRLLRAMDRSLRRNNPDAYNENGTIKKGAKLVKSKNYQRKVDRLREMHRVAAAERKCRHGQTINLLLSIAGDIRIEKNSWKAFQKGHFGKSLGKSAMSGFIAQLKSKAASAGLKVTEVNPYKLKLSQYDPYTDTYRKKDLSERWQEMKAGSGQYIQRDVLSALLLYCANIEKEIHIPKVAVEQLEGAKQFLTDAGYVVLKSTSSRDQRDPRLASEPKAMTPEMARQKILRGAGDSHLPTDQELGRIRAGGKVSTWSKETFPLQRGVV

SEQ ID NO: 3376 - protein, 618 aa, unidentified
  REGION 1..618: note = Description of Unknown: uncultivated organism sequence
  REGION 1..618: note = Category: MG91 effectors
  REGION 1..618: note = Description: MG91-568 effector
MAKENFVLTLPLKVEKWQADILDKRYELLRQIYNMVQQKLLRQYIYFSQQKAYRVCESFQQKREFFASHPFHIKGINTKNGEPFDIKFPYTYESRSSGTGKRPSNGISDYVSKLWSHSVGQNTTLSNLGINSYILEELGLHIMGAWEKRLYDPKSSHVSFKKYGDVNSFGSRYKKDKKSNRITLPGFTINIKEGYITYNANGRQGQFADLIRLSIDFSREKKGYATEALKGGLDSVRKLIIVRRCIRGKNKYYLQLTIEGDKPQKGRVLGKGNVGIDIGPSTIATSSLLGVHFDKLADKCDNIEHELYLVGRKMDRSRRANNPQNYNEDGTIKRGVRLVWKKDKDCKRYANLKQVRKELYRKQAEIRKHQHLEMANALLSQGDTFIVENNPIDAWVRRAKETTKTKTGKNRCKKRYGKSVANHAPAMLVSILKNKVQSLGGQFYEVDVRYAATQFDFTNGVKTKHDVSERSITLSNGRTLQRDMLSAFNLQHINQESIGTNDYAYNIEQMQADYPIFCRLESAERNRFKVARHNERDAQYFVGESKKILRLQPQKDTAANRHNGGVDRKHCNTCLGSKTKENAEITGSGLVRESIERVSQVPDEYHPVDTNSIILDGL

SEQ ID NO: 3377 - protein, 555 aa, unidentified
  REGION 1..555: note = Description of Unknown: uncultivated organism sequence
  REGION 1..555: note = Category: MG91 effectors
  REGION 1..555: note = Description: MG91-569 effector
MAGGIRATTRLMLYHRNMTTQTFILELPIKADDSQSRTISKKFEYGRMLYNATLGSGLGRLTQMRQDPEWRCACEMSKGKERNELFRRLNRQYRLTEYDFHSDIARHREGTKRKSELGICEAQKLATQAFNAVSRYMFKQGGRPRFKSFKRGLHSLEGKTNTTGLKFKPEKMLLDWCRKTYQVMLDPEDTYALEALYADKERTKFKRIKYNRIVCRNIKGVKRFYLQVVLEGTPPVKHAYAPASERMAIDPGPKAFAVFCPRVQAKVQIAPQAKVNEKAIRRIQRSMDRSLRAKNPNAFDEKGRIKPGVSLAYSKGYQARLTKLREAHRKVAGTRKCEHGELANLLLECAGNIRIEKNSWEAFKRSHFGRSINNSAASGFIQKLKSKAERAGLTVEEVSPYRLKPSQYDPYKDEFVKKALGERWMYLGDESTVIQRDIMSAILIYFADLKNQTHNPEVVKTNLEGLKRGLTDAGYVKHLKLPRSSGSKDPLFAPEPKALTTEELRSKCFRVDSDRHSSTINGTDGKAVGWSETFPLTGELFRDSVLSSVSARGAS

SEQ ID NO: 3378 - protein, 530 aa, unidentified
  REGION 1..530: note = Description of Unknown: uncultivated organism sequence
  REGION 1..530: note = Category: MG91 effectors
  REGION 1..530: note = Description: MG91-570 effector
MTFQSFVIELPIAVDDAEMRTIVRKLEFARQLHNATLGTAMGQLQQMRQDTAWKQACAMPKGKERTAAFRALDRKYGLTEYDLHSVIARHREGSGRKAELGINETQKIATRVFQAINRYKLGLGGMPRFKSSKRGLHSIEGKTNKTGLKFRPEKKVLNWCGHDYRVLIDPKDDYIQRALKENERSDKYRKIKYCRLVRKRIRSSDRFFLQVVLEGTAPVKHVYAPVTERAAIDPGPQSIALFSKEFAGKIQVAGSNNFNEAVSRRLLRAMDRSLRRNNPDAYNEDGTIKKGAKLVKSKNYQRKVDRLREMHRVAAAERKCRHGQTINLLLSIAGDIRIEKNSWKAFQRGHFGKSLGKSAMSGFIAQLKSKAASAGLKVTEVNPYKLKLSQYDPYTDTYRKKDLSERWQEMKAGSGQYIQRDLLSALLLYCANIEKEIHIPKVAVEQLEGAKQFLTDAGYVVLKSTSSRDQRDPRLASEPKAMTPEMARQKILRGAGDSHLPTDQELGRIRAGGKVSTWSKETFPLQRGVV

SEQ ID NO: 3379 - protein, 1365 aa, unidentified
  REGION 1..1365: note = Description of Unknown: uncultivated organism sequence
  REGION 1..1365: note = Category: MG91 effectors
  REGION 1..1365: note = Description: MG91-571 effector
MKKDSMEYYLGLDMGTNSVGWAVTDTNYKLLRLKGKDAWGIREFDEAKTSEDRRVNRISRRRREREKVRIGLVKDYFSDAIHAVDPNFFMRLENSKYYLEDKDEDVKTPNAIFDDPDYTDKDYYDAYPTIFHLRKELIEDKKPHDVRLVYLAVLNMFKHRGHFLNSGLSTDSDNNIKIDGAWEDLNKTYEELYGEELAVVNCDELLSVLSDRDKSRSAKLEQLLEILQINKKTDKQKAELIRLICGLKSEAKKVFSDIETEEKVEICFTDIAYEEKLPDIAEAVGEENIALIQAAKTVSDIGVLAGILHGDDYLSFARVKTYEKHAEDLKRLKRVIRKYGDEAQYDSLFRSEEDGSYGAYVNSFNAGKKQRRSFKKRTMDEFYKTVKTVLSKLKGASDDPDYQIIEKDIENETFMPKQLTSANGIIPNQVHCRELKVILKNAEGYLPFLLEKDEGGRTVTDRICALFSFQIPYYIGPVSEQSEKNGGNGWVVRKEQGQVLPWNLEEKIDTAATSQRFIERMVRRCTYISDEMVLPKASLEYERFMVLNEINNLRIDGEKIPVSLKQEIYHELYEKGKRVTRKQLVSYLTNRGCIENEEQVSGIDITLHQYLSSYGKFYPIFGDDMKTDACKSMVEEIIRLATIFGDAKHLLRKQITEKYGDRISDPKILKRILGFKFKDWGNLSKRFLELEGCENGVGEIVPLIDMMWQTEFNMMELLNSPRFTYRQTLEEYQQKGLKPLTEWKAEDLNDYYFSAPVKRMVWQTLKIIKEIEMITGSAPKRVFVEMTRKPGEKDKRTDSRKKKFLELYKNIVDEDADWRKHWEGVISKADEDGSIRSKKMYLYLTQMGRCMYTGREIDLNDLFDDNLYDIDHIYARHYVKDDNIANNLVLVYKPENARKTDNYPIDSDIRSKMSGYWSLLHRRKLITDEKYRRLTGRNPFTDEQKADFIARQLVETSQATKGVTEIIKGVFPPEQTTIVYAKASNVSDFRHKYQIHKSRLVNDFHHAHDAYLNIVVGNVYYVKFTQNPLNFIKKEYAMDQEKHRYNLEKMFVWDVKRGDEIAWIGNGKDDKNTQGSLVTVKKMLAKQTPILSRMPITGHGGIANATLYSAKTAKDTGYMPLKTSDPKMQDVTKYGGYSTISRAYFFLVESGTEKKRIRTLETVPVYLVEKLQTKEVLEEYCRNQLKLINPSVRVSKIRLQSLINLNGYYVQMTGVTGKQVILRNAVSLVLNDDEMFYAKKIEKADNGSFEENVITKEKNVAFYDALARKHMETIYSLRPNPVGQKLEKARDLFVELSIEKQCAVLYQILNLSIIGPVKADLTLIGESKNTGVMLTSKNITKNKTFELINQSVTGLFEERVDLLTV

SEQ ID NO: 3380 - protein, 1352 aa, unidentified
  REGION 1..1352: note = Description of Unknown: uncultivated organism sequence
  REGION 1..1352: note = Category: MG91 effectors
  REGION 1..1352: note = Description: MG91-572 effector
MLEKPYYLGLDMGTNSVGWAVTDQHYNLLKAKGKDLWGIREFIEADTSVERRTHRISRRRRQRERARIGLLNDYFHDAIIAIDPSFFQRLENSKYHLEDKDQNVRYKYNIFNGPDYTDVDYYAQYPTIYHLRKELLENPKPHDVRLVYLALLNMFKHRGHFLNAGISDGNNEHSLKDAYINFAISVSELTEDYFNQDVDYSAIEGILSSRDLNRTKKAEELSTVLGIDFKDKKYKEYLRAICGLKINAYTLFSDQLPNDTTKIDLCVSDASFDEKSEELVSLIGEDLFQIILNIKEIYDIGSLAGILKGYTYLSQARVAAYDKHKHDLKLLKTSIKKYCTKEEYNNFFNSDADGSYASYTGSFNSGNRERRVGSKRTSEDLYKEIKKLLKDASKNDPAINEIFTSIETESFLPKQLTASNGIIPNQVHSKEMAKILANAENYLPFLKDTDENNLSISNRILQLYKFQIPYYIGPVTEKSQRDGGNGWVIRKDNGRVLPWNIEEKIDVKATSEAFISRMVRRCTYMNGKQVLPKASLEYESFRVLNEINNLRIDGERISVALKQDIYTDLFQKGKKVTKKQLCNYLVTRGLIKSSEQVTGIDIAINNSLSTYGKFKAILGEDIKLDHIQHMIEDIVFWCTVYGDSKQFLKEQIEDKYNGKLSPEQIKRILGFKFKDWGNLSKEFFELKGADKSTGQAISIIRALWENNLNLMELINSPEFDFKERLADYEVNSLKTLSDFEPEDLNEYYFSAPVRRMIWQTTLIIKELVHVLGKEPDRIFIEMTREKDASRGRTLSRKKKFEDLYKNVKDENNDWAKVIEHADESGTIRSKKMYLYLTQKGRCMYTGNHIELSDLFNDNLYDIDHIYPRHFVKDDNIDNNLVLVTKEKNAHKSDNYPLEAEIFNKQRNMWTQLRKEGFISEEKYNRLMGRNAFTDEQKAGFIARQLVETSQGTKGVAELFHQLLPNSKIVYAKAGNVSDFRRNRELPKSRLVNDFHHAHDAYLNIVVGNVYYMKFTQNPINYIKNSYNKDMNKNNYNLSRMFDWDVKRGDEVAWIAQKKDSATGTISTVKKMLSKNTPLMTRLSYEGKGALANETLYSAEKAKGEGYIPFKSSDAKIQDVTKYGGFTSVTGAYFFLVEHDEKKKRIRTIESVPLYLADKIEKDSSELERYCDKLGLVNYDVRVRKIKIGSLIKYNGYFCYITGKTGYRLIVRNATNLCLASNWTKYIKKIEKYKETTIIDNVITAEENIKLYNELLNKFTVGIFGRRPNPIGEKMDSARDKFASLSTENQCLALYQILQLSAILGNESDLQLIGSSTHAGKMLISKKIGTDEIYLINQSPTGLFETKIDLQTI

SEQ ID NO: 3381 - protein, 1127 aa, unidentified
  REGION 1..1127: note = Description of Unknown: uncultivated organism sequence
  REGION 1..1127: note = Category: MG91 effectors
  REGION 1..1127: note = Description: MG91-573 effector
MNMSKRILSLDLGITSIGYSILNEMDSNKYGLVDYGVSMFDKATDKDKKSKKLLHSASKSSSKLYDLRKERTRNLANLFEKYNLGSASELLNQEKQNRFINKWYLRAEKSFSERLTIEELFSIFYLVAKHRGYKSLDTDDLLEELLIELGFKVEEKKEKDAEKGKVKQALKTVESFRKKYPEKTVARIIYEIEIQKENPTFRNHDNYNYMIRREYINEEIRKIVQAQDEFGLFDAGIDIELFIKELIDTVDDQKDSTNDMSLFGNCEYFPEHKVTHQYSLLSDIFKMYQSVANITFGKTKISKEQIETIVNDFFKKIKLGKNIADIKYQDIRKVLKLNDEVKIFSKEDYHLDKKGKKIHSTITKFHFLSSLGKIGKSFIESIFEKENKFEILKEIFDVLEFEKAPKSMYNQINEIFIKYTLVEDEKLKNETIINLIKHKSGNSLNISAYTMIQFIPYFERGMTTDEIKQELKLERNEDYSTYKKGIKHLHVKTFEKDDNLEINNHPVKYAVSATMRLVKHLHVTYGVFDEIRVESTRELSQNEETKKAIEKANKENQAKFQKIIDNEEYQKIANHYNKNLKRYARKIMLWEEQEKLDMYSGEVISFNDIFSNKVDIDHIIPQSLGGLSVKHNLVLAHRDENHKKSNQLPMHFVVDTVDYVNRVEHLFKEYKINWKKKINLLAETLDDRYKDTFESKELRATSYIEALAAQMLKRYYPFPDKEKQANGQAVAHVQGRATSNIRKLLGVKTKVRDTNIHHAIDAILIGLTNKSWLQKLSNTFRENMGVIDDKARANIKKEIPLIEGIEPKELVELIEDAYNIYGEDSVFYKDIFGDTKVVNFWVSKKPMSSKIHKDTIYAKKPNGLFTVREGIIKQFIALKTTVTTDPEQFMKNFEKKILQKMYLFMTNPNDVICKIVISRAEEINLLLQSFVNIDRKNKEDMSEAKEKLDKLMHKELLDNNDNVIRKVKFYQSNLTGFDIRGGLATKEKTFIGFKATLENEKLVYERIDASNFKRIQKENDGSFKVYKNDIVFFVYPDGSFRGGKIVSFLADKGITAFLNSKFPSASELQPKSFCKMDKGKKSGAKQQSINKSIGIIKLNLDILGNIKSYSNFGEVSKEVELKIFHKE

SEQ ID NO: 3382 - protein, 533 aa, unidentified
  REGION 1..533: note = Description of Unknown: uncultivated organism sequence
  REGION 1..533: note = Category: MG91 effectors
  REGION 1..533: note = Description: MG91-574 effector
MSHSYILSFELTLPQRIYPYLDRLFNVFKWEVRRTVRKIWNEDFFEKLKGKGSASSILTKVLERPSNIPSRVYRNILELSGEIIRSHIERKRIYDYLIDKPCRVLFDEDEIADKLDTSSLFVLNVKRQVRKILKKEKEKKSYFETVKPYFKGKVIIFSADDSVENGQFKKLRFTEKYLELEIKVPDGNLWKWIKVKKFIPDRLKKFLPKAKRTCAPIIKKVYLKSGFYIYRLVIPFEFEVKFSEKNFRVFAIDLSPSEKRLGVGAIVTPEAHSRPLFFSAEKMIRKLERILKEISNLERKIDNIANEIHVTGNKEHKRRLEKRLKHLFVEQKLKWKKFTELRKQILEVFTKLILEHARAYNCSFIVVERLKFSKLPDWKHPRMKRFFSQWFYLRFVERLKQKALRYGIKVFLTNPCRTSRICHRCGKAGLLEKLEFLCECGIYDRDYNASVNIGKKALQILMSGAKSEPYMGEDTPGRFPFPRVPAHQVLPYHFRALLFLITLTRLISYLRIVETSSLKLKNLIRWTGSDRYG

SEQ ID NO: 3383 - protein, 994 aa, unidentified
  REGION 1..994: note = Description of Unknown: uncultivated organism sequence
  REGION 1..994: note = Category: MG91 effectors
  REGION 1..994: note = Description: MG91-575 effector
METLRKEYPEKTVARIIYEIEIQKPNPTFRNHDNYNYMIRREYIREEIEKIVLSQMDFGLFAKTFDVDTFIKELISTIDDQKDSTNDLSLFGNCEYYPEEKVAHQYSLLSDIFKMYQSVTNITFGKTKISKEQIKIISDDFFKKIKQSKNIADIKYQDIRKLLKLKDEVQIFGKEDYRLDKKGKKVHYTITKFHFLANLGKIDNSFMDAVFEKKNKYEILKEIFDVLEFEKAPKSMYTQINAVFMKYTLVEDERLKDETIINLIKYKTGSSLNISAHAMIKFIPYFEKGMTLDEIKKELNIKNFEDYSEFKKGIKYLGLGIDKKLFVTVEARDRIKKYPASQFEFDNQLIINNHPVKYVVSATMRLVKHLHVTYGAFDEIRVESTRELSQNEETKKAIDKANRENEAKFQKIIEDEEYQKIAKHYNKNLKRYARKIMLWEEQDKIDIYSGKVICFEDIFTNVVDIDHIIPESLGGLSVKHNLVLAHRDENVKKSNQLPMNFVTDKVAYVNRIEHLYKEYKINWKKKINLLAETLDDSYKDTFESKSLRSTSYIEALTAQMLKRYYPFPDKKKQVNGQAVAHVQGRATSNIRKLLGVKIKVRDTNIHHAIDAILIGLTSKSWLQKLSNTFRENMGVIDDEARAKINKELPLIEGVEPKELVELIEDAYNVYGEDSVFYKDIFGKTKAVNFWVSKKSDTSSLHKETIYGIDKIKGKIKDKQYTGLTTLRIDIIKRLKDAQKKPTLPKIGDDAHMFLNEYQEELIKKLYVYQYNQEDKILAIIQAKASDIAKCLEKYSDIKNENKDLFSKAKEELSCIIDKPLVDYNGNIIRKVKIIVSNKEKEPMIRGGTTVAERIAIGFSVYTLEKDKLLFRRIDLKDKLSKSLTKVNASSSMNIFRNDLIYIIFKKSEKNLVGYLESFDDKTNKIRLYDARFPKRLELQPKKYKVSSGKSRKEFGVGSAMGFIKINLDILGNIKSHTRFGEVSKEVEAQIFHKE

SEQ ID NO: 3384 - protein, 1358 aa, unidentified
  REGION 1..1358: note = Description of Unknown: uncultivated organism sequence
  REGION 1..1358: note = Category: MG91 effectors
  REGION 1..1358: note = Description: MG91-576 effector
MQETGKDYYLGLDMGTNSVGWAVTDENYVLMRAKGKDLWGIREFDEALTAVDRRTHRVARRRRQRETARIGLLKEYFHDAIAEADPNFYQRLDNSKYHEEDKDSAVKGKNGIFNDANYTDKDYFKQYPTIFHLRTELIESTEKHDVRLVYLALLNMFKHRGHFLNAGLSTESENTMDTAYHNFVETAAQTIECNFMETVDIEKIKEILGSRDYSRSKKAELVAQLLHVDSKNKVQMACIKCICGLKVTAAAIFGDKMAADEEKKTDICFSDFGYDEKVPVILETVGEENFELVLAMQEIYDIGSLAGIMKDSLYLSMARVKEYEQHGKDLKILKGVVKKYATKEEYDTLFRTMEEGTYSAYVNSVNTKKKSRRDVKKRTRDEFYGRLKKIISTMPQDDSDVLYIKDKMEKEAFLPKQLTASNGVIPNQIHAREMKKILQNAETYLPFLKEKDTSGLTVSERILKLFSFQIPYYVGPVSEKSKLNGGNGWVVRKEEGTVLPWNIEEKIDMTATSREFVERMVRRCSYLSDERVLPKGSLLYERFCVLNEINAIKVDGVKIPVEIKQDLYSKYFKKGKKVTRKKIAEFLIARGVIKEDQTELISGIDIAVNSTLSTYAKFYAIFGEKMEQDSYKKMVEQIVEWCTIYGDAKKFLEQKIKECYGNILTQEEIKRITGFKFRDWGRLSKEFLELSGCSKATGEVMPLISMMWETNDNLMELLDDNYYTYREALEEKQNNAFRLLADIEPEDLDEMYFSAPVKRMVWQTLCIIKELEKVLGKAPKRLFVEMTRNEQKDKKRTDSRKQQFLDLYKNIKDESRDWKELITRADENGTLKSKKMYLYLTQRGRCMYTGHPIDLEDLFKDNRYDIDHIYPRHFVKDDNIMNNLVLVEKEKNAHKSDNYPLEEEIYKKQLPVWKDLHQCKLITDEKFKRLTGRNEFTDEQKAGFIARQLVETSQGTKGVTTILERALPDTKIVYAKASNVSEFRQKRDLLKSRVVNDFHHAQDAYLNIVVGNVYFVKFTQNPLHFIKAEYDKNKAQYEYNLSRMFDRDVRRGNETAWIGCKKGEEAGTIVTVKKMMAKNTPMLTRLSFEGKGGLADQTLYSAEKAKGNGYIPLKTSDAKMQDVTKYGGFNSVSTAYFFLVEHELKGKKVRTLETVPIIWRDRIEKDETMLLKYCTDVLELKNPSIRVKKIKLQSYIKKDGYYMYITGKTNKQITTKNAVELCVNQRWIDYIKIIEKTVEKKKECEEVNYNKNVEFYDLLLTKHTQEIFSNRPNPVGAKLKQGRDKFLSLTLFEQSTVLYEILQLSIIGNTRADLHSIGGAPISGVMLLSKKITDSKEFILINQSVTGLFEQKVDLLTV

SEQ ID NO: 3385 - protein, 497 aa, unidentified
  REGION 1..497: note = Description of Unknown: uncultivated organism sequence
  REGION 1..497: note = Category: MG91 effectors
  REGION 1..497: note = Description: MG91-577 effector
MTSPTFIIELPIRVSDSESRTILRKLEFARQLHNATLGTALGQLQQLRQDSEWEKACLMPKGKERSELFRKLDRKYQLTEYDLHTVIAKHRQRSGRKTELGINETQKIATRVFQAVNRYKLGLGGRPRFKSLSRGLRSIEGKSNKTGLKFNIEKSVLSWCKHDYRVFIDPQDDFLQRALRSEGRSGFKKVKYCRLVRKTIKGKNRFYLQVVLEGQAPIKHIYASTSERLSIDPGPQTIAVFSDVWAGKIKVSPTAQVDEKRLRCIQRSMDRSLRKSNPDCYESDGTLRKGCVLKKTKGYEKRIQRLQECHRRAAATRRCEHGQLINLLLSMAGDIRVEKNQWKAFQRGHFGKSLGKSGISGFIERLKSKAESAGLKVTEVKPYKLKLSQYDPYTDQYRKKSLNERWHSLGESSEWIQRDVMSALLLQCADLEEEKHIPTEVIKTLEGVKQLLRDAGYVILKPSSNGESNPTFASEPKAVTPEKVRLEIFCGASDSYL

SEQ ID NO: 3386 - protein, 497 aa, unidentified
  REGION 1..497: note = Description of Unknown: uncultivated organism sequence
  REGION 1..497: note = Category: MG91 effectors
  REGION 1..497: note = Description: MG91-578 effector
MTSPTFIIELPIRVSDSESRTILRKLEFARQLHNATLGTALGQLQQLRQDSEWEKACLMPKGKERSELFRKLDREYQLTEYDLHTVIAKHRQRSGRKTELGINETQKIATRVFQAVNRYKLGLGGRPRFKSLSRGLRSIEGKSNKTGLKFNIEKSVLSWCKHDYRVFIDPQDDFLQRALRSEGRSGFKKVKYCRLVRKTIKGKNRFYLQVVLEGQAPIKHIYASTSERLSIDPGPQTIAVFSDVWAGKIKVSPTAQVDEKRLRCIQRSMDRSLRKSNPDCYESDGTLRKGCVLKKTKGYEKRIQRLQECHRKAAATRQCEHGQLINLLLSMAGDIRVEKNQWKAFQRGHFGKSLGKSGISGFIERLKSKAESAGLKVTEVKPYKLKLSQYDPYTDQYRKKSLNERWHSLGESSEWIQRDVMSALLLQCADLEEEKHIPTEVIKTLEGVKQLLRDAGYVILKPSSNGESNPTFASEPKAVTPEKVRLEIFCGASDSYL

SEQ ID NO: 3387 - protein, 529 aa, unidentified
  REGION 1..529: note = Description of Unknown: uncultivated organism sequence
  REGION 1..529: note = Category: MG91 effectors
  REGION 1..529: note = Description: MG91-579 effector
MNTPSFVIELPIRTDDHERRTIVGKLEYARCLHNATLGTALGQLQQMRQDPAWKKACRMPKGKERTNAFRALDRQYGLTEYDLHAAIARHRQGSGRKEELGINETQKIATRIFQAVSRYKLGLGGRPRFKSQSRGLHSIEGKTNKTGLKFKPETSTLDWCGHEYRVLIDQRDGYLQRALREEADPKRWRKVKYCRLVRRRIRGKERFYLQVVLEGTAPLKRVYAPVVERLAIDPCPQTVAVFCPRFAGKIEVAPHAKVDEAELRVLQRSMDRSLRSCNPKAYNEDGTIKPGVELVKSKGYLKRVARLQELYRKAAATRKCDHGQLINLLLCLAGEIRIEKNSWAAFQRSHFGKSLGRSGVAGCLSQLKAKAESAGLKVIEAAPYKLKLSQYDPYTDSFRKKQLNERWHRAGMGDEYIQRDVLSAALLYCADLETQSHIPKAALALLEGAKQLLKDAGYWVSKPTSSQDPCDPRFAPEPKALTPEAVRLEIFGGTGDSPLQPSCPNGSKGAEGKVSACSKETFLLQQGVV

SEQ ID NO: 3388 - protein, 484 aa, unidentified
  REGION 1..484: note = Description of Unknown: uncultivated organism sequence
  REGION 1..484: note = Category: MG91 effectors
  REGION 1..484: note = Description: MG91-580 effector
MAHKENQKAFVVTFPLHTEKWQEDRIDKMMRMLTTFYNDRQRKLVRRYIYLSHSKAYKEAKGKGVVAFKNYMKENGFSQYGLDAFFKADTKGALYQCGLNSMFLQYLSQCAWSAWDKKLFGKGDFVKTDKVVNIFCSRNMKGRFCGFDYDLSTFTIRIKSTCTKKIICTIPFVVNKNSEYELYALSQKICRIGIVRKLIRSKYKYYVQFTFDGVPYNKGRNIGTGIVGIDPGPSKIAIVSDEKVEIAKLAPGIEEDERKTARLRRKLDRSRRATNPHMYKEDGTIIKGQRQTYFSKVYNETRKQLADAQRKLAAKRKIAHNELANTLLEYGDTFKVEANSYKSMQARTKATSMTKSGRIRSKKRYGKSINNRAPSEFLVILKNKLLYYPKGKYYDVPSSYACTQFDFTNESFTEHKISERRIVTSDGIQHNRDTLAAFNIKNAIVNDTSTKKKKITKSKEFFNIVKMKASYNEFCVKERYLLSV

SEQ ID NO: 3389 - protein, 530 aa, unidentified
  REGION 1..530: note = Description of Unknown: uncultivated organism sequence
  REGION 1..530: note = Category: MG91 effectors
  REGION 1..530: note = Description: MG91-581 effector
MTSQSFVIELPIAVDDAEMRTIVRKLEFARQLHNATLGTAMGQLQQMRQDAAWKEACVMPKGKERAAAFRALDRKYGLTEYDLHSVIARHREGSGRKAELGINETQKIATRVFQAINRYKLGLGGMPRFKSSKRGLHSIEGKTNKTGLKFRPEKKVLNWCGHDYRVLIDPKDDYIQRALKENERSDQYRKIKYCRLVRKRIRSSDRFFLQVVLEGTAPVKHVYAPVTERAAIDPGPQSIALFSKAFAGKIQVAGSNNFNEAASRRLLRAMDRSLRRNNPDAYNENGTIKKGAKLVKSKNYQRKVDRLREMHRVAAAERKCRHGQTINLLLSIAGDIRIEKNSWKAFQKGHFGKSLGKSAMSGFIAQLKSKAASAGLKVTEVNPYKLKLSQYDPYTDTYRKKDLSERWQEMKAGSGQYIQRDILSALLLYCADIEKEIHIPKVAVEQLEGAKQFLTDAGYVVLKSTSSRDQRDPRLAPEPKAMTPEMARQKILRGAGDSHLPTDQELGRIRAGGKVSTWSKETFPLQRGVV

SEQ ID NO: 3390 - protein, 530 aa, unidentified
  REGION 1..530: note = Description of Unknown: uncultivated organism sequence
  REGION 1..530: note = Category: MG91 effectors
  REGION 1..530: note = Description: MG91-582 effector
MTSQSFVIELPIAVDDAEMRTIVRKLEFARQLHNATLGTAMGQLQQMRQDAAWKEACVMPKGKERAAAFRALDRKYGLTEYDLHSVIARHREGSGRKAELGINETQKIATRVFQAINRFKLGLGGMPRFKSSKRGLHSIEGKTNKTGLKFRPEKKVLNWCGHDYRVLIDPKDDYIQRALKENERSDQYRKIKYCRLVRKRIRSSDRFFLQVVLEGTAPVKHVYAPVTERAAIDPGPQSIALFSKAFAGKIQVAGSNNFNEAASRRLLRAMDRSLRRNNPDAYNENGTIKKGAKLVKSKNYQRKVDRLREMHRVAAAERKCRHGQTINLLLSIAGDIRIEKNSWKAFQKGHFGKSLGKSAMSGFIAQLKSKAASAGLKVTEVNPYKLKLSQYDPYTDTYRKKDLSERWQEMKAGSGQYIQRDILSALLLYCADIEKEIHIPKVAVEQLEGAKQFLTDAGYVVLKSTSSRDQRDPRLAPEPKAMTPEMARQKILRGAGDSHLPTDQELGRIRAGGKVSTWSKETFPLQRGVV

SEQ ID NO: 3391 - protein, 529 aa, unidentified
  REGION 1..529: note = Description of Unknown: uncultivated organism sequence
  REGION 1..529: note = Category: MG91 effectors
  REGION 1..529: note = Description: MG91-583 effector
MSTPSFVIELPVRTDNGEQRTIERKLEYARCLHNATLNTALGQLRQMRQDPAWKEVCRMPKGKKRTDAFRALDRQYGLTEYDLHAVIARHREGSGRKAELGINETQKIATRIFQAVSRYKLGLGGCPRFKSFSRGLHSIEGKTNKTGLKFKPEEAVLDWCEHEYRVLIDQEDDYLQRALRDDSDPEKWRKVKYCRLVRRRLRGKVRFYLQVVLEGTAPLKHVCAPVTERLAIDPCPQALAVFCPRFAGKILVAAHAKLDETAIRVLQRSMDRSLRSCNPKAYNEDGTIRQGVELVKSKGYLKRVSRLRELHRKAAATRKCDHGQLINLLLSLGGEIRIEQNSWAAFQRSHFGKSLGKSAVAGCLSQLKAKAESAGLKVIEVAPYKLKLSQYDPYTDSFRKKQLNERWHRAGTGDEYIQRDVLSASLLYCADLETQSHIPKAALALLEGAKQLLKDAGYWVSKPTSSQDPCDPRFAPEPKALTPETVRLEIFGGTGDSPLQPSCPNGSKGVEGKVSACSKETFPLERGVV

SEQ ID NO: 3392 - protein, 500 aa, unidentified
  REGION 1..500: note = Description of Unknown: uncultivated organism sequence
  REGION 1..500: note = Category: MG91 effectors
  REGION 1..500: note = Description: MG91-584 effector
MTTPTFVLELPVKLGQGELAEVRKRFNYARNLYNATVGTALGQLQQMRQDPQWRQACSMPKGKERTTTFRRLDEKYRLREYDLHAIIAKHREASGRKHDLGINEAQKLATRVYEVVTKYKLGLGGKPRFKTQSRGLHSISGKTNKTGLRFKPEKSRLYWNSLEMFVEIDRKDRYIFEALHVDKDPSRFKRIKYCSLVRKVINGKERYYLQLSLEGQAPIKHIYAPQTERLAIDPAPKAITVFHKETVFKASIEVSVHAEKQKKLQKQMSRSLQLNNPDAFDENGTLKKGARLQVKSKSYLKKQTQLCEVHRRAAAARKNLHGQVSNLLLSLAGEIVLEKNSWKALQRGHFGKSLGKSGMGAFERTLISKAERAGCKVHLVAPYILKPSQYDPFKDAFEKIPLKQRWRRMDDKELIQRDMLSAVLLYCADLANERHNRTEIFQTLEGAKQLLSDGGFVVKENPTSNPALDPRFAPERKAQAIEEVRREILCGCKGQLNANR

SEQ ID NO: 3393 - protein, 529 aa, unidentified
  REGION 1..529: note = Description of Unknown: uncultivated organism sequence
  REGION 1..529: note = Category: MG91 effectors
  REGION 1..529: note = Description: MG91-585 effector
MSTPSFVIELPVRTDNGEQRTIERKLEYARCLHNATLNTALGQLQQMRQDPAWKEVCRMPKGKKRTDAFRALDRQYGLTEYDLHAVIARHREGSGRKAELGINETQKIATRIFQAVSRYKLGLGGRPRFKSQSRGLHSIEGKTNKTGLKFKPETSTLDWCGHEYRVLIDQQDGYLQSALREETDPKRWRKVKYCRLVRKRIRGKERFYLQVVLKGTAPLKRVYAPVVERLAIDPCPQTVAVFCPRFAGKIEVAAHAKVDEAELRVLQRSMDRSLRSCNPKAYNEDGTIKPGVELVKSKGYLKRLARLQELYRKAAATRKCDHGQLINLLLSLGGEIRIEQNSWAAFQRSHFGKSLGKSAVAGCLSQLKAKAESAGLKVIEAAPYKLKLSQYDPYTDSFRKKQLNERWHRAGTGDEYIQRDVLSASLLYCADLETQSHIPKAALALLEGAKQLLKDAGYWVSKPTSSQDPCDPRFAPEPKALTPETVRLEIFGGTGDSPLQPSCPNGSKGVEGKVSACSKETFPLERGVV

SEQ ID NO: 3394 - protein, 530 aa, unidentified
  REGION 1..530: note = Description of Unknown: uncultivated organism sequence
  REGION 1..530: note = Category: MG91 effectors
  REGION 1..530: note = Description: MG91-586 effector
MKNSSIIVSYEITLPQKIYPYLDRLFSVFGRNVRYFIDKLWNDDTLKLINQNGYAVSILKEIIQKPKDLPSRVFRNVLELSGQILRSQIERRRLFDKLIQKPCILIQSDREIAKFLNTSIPFALNVKRQVLKVLKKGEKRDYLSLIKPSFSNTVVITSADDNLKNGQFKKLKIDKNKLTLELKVPVGNNWEWIKVEKFLTDRLKKALKNAKEVKAPLIKKVDLKSGFSVYRLVIPIEIQTKVKDKVERIFALDLSSSEKRLGVGVIVDKEGHSKPVFFNAFKMVRKLERLYKEISSLERKIDHIADGLHSTVKKKHRERLYIRLRHLYQEQKLRWRKFKELRKQILETFTNLIIAHTKAYSCDAITIEDLKFQDLPEWKNRRFRRLFSTWFYSRFENRLRHKAQREGIKILTVNPFNTSQVCHRCGSKCKADRLEFKCESCGKHFDRDYNASVNIGMKALNLACKTKSKSYMDKDTPARFPSLQVLTRYKFKSLLTFLPLLKLIAYLRLVETSYLKLKNLFKYVNSDKYG

SEQ ID NO: 3395 - protein, 495 aa, unidentified
  REGION 1..495: note = Description of Unknown: uncultivated organism sequence
  REGION 1..495: note = Category: MG91 effectors
  REGION 1..495: note = Description: MG91-587 effector
MAREKEDSGCFVVTFPLKTEKWQEDRIDKILNLLTVRYREKQKTLLDRYIHLSHSPEFKEAKNAGLKAFRDFMNEHKFTKYDVEKVFSDSSQSKSATTDIMLTHGINSVIMQELSHRAWSAWEKKLYGQGKFIRLDNEVNSFKSRLQGSNIIGFEYSFTDMTLSMKATKPKKHTMFTIPFIVNRKSEYEAYALGCEVRNIAIVRQQIRGKNKYYVQFSFAGTPYNKGRKMGTGIVGIDPGPSKIAIVSDSEIRITTLAPSVKRDERAIRRMQRKLDRSRRATNPDNYNDDGTIKRGIKLKFDKSNSYKRTQAKLADMQRKLAAKRKIDHNILANEIITMGNEFHVENNSFKSMQARSKETKKNDKGKNLSKKRFGKSLANRAPYELLTILKNKVCQYADGEYVDIPSRVACTQFDFTNGEFTKHDPEERIITTSDGLVHDRDALAAFNMRFVNRQRIEGKKKLEKDKENFDLQAMTEAYKQFCALEENIKIGKRN

SEQ ID NO: 3396 - protein, 490 aa, unidentified
  REGION 1..490: note = Description of Unknown: uncultivated organism sequence
  REGION 1..490: note = Category: MG91 effectors
  REGION 1..490: note = Description: MG91-588 effector
MARENENSGCFVVTFPLKTEKWQEDRIDKILTLLTVRYREKQKILLDRYIHLSHSPEFKEAKKTGLKAFRDFMNEHNFTKYDVEKVFSDSSLSKSVTADIMLTHGINYSIMQELSHRAWSAWEKKLYVQGKFIKLDNEVNIFKSRLKGSTITGFEYSFTEMTLSMNATKPKKHTMFTIPFVVNRKSEYEAYAMDCEVRNIAIMRQQIRGKNKYYVQFSFAGTPYNKGRKIGTGIVGIDPGPSKIAIVSDSEIRITTLAPSVNRDERAICRMQRKLDRSRRATNPDNYNDDGTIKRGIKLTFEKSNSYKRTQTKLADTQRKLAAKRKIDHNILANEIIAMGNEFHVENNSFKSMQARSKETKKNDKGKNMSKKRFGKSLANRAPSELLTILKNKVNQYADGDYVDIPSGVACTQFDFTNGEFTKHELKDRTITTSDGVVHDRDALAAFNMRFVQKKKVEGKKKIEKAKENFDLQAMTEAYKHFCSLEKNIK

SEQ ID NO: 3397 - protein, 524 aa, unidentified
  REGION 1..524: note = Description of Unknown: uncultivated organism sequence
  REGION 1..524: note = Category: MG91 effectors
  REGION 1..524: note = Description: MG91-589 effector
MNEVFVLELPLQVEKYQADILNKRYEQLRQLYNYVQSKLLRQYRYFEQMKEYQVCKTIREKREFFRNHPFNINGVFDRSGRLLDITFDEYGIQGFVEKMIHKSVGENTTYADLGLNTLILDYLSASIWRAWDKKLYDLKAKRISFKKYGELDSFSSRRKVVNGTARFFGVELYLDKMELAVKVNGKVGKNAKFITLKMLHNPKHADYEMWALKGGVDSVKVVKVVRRLVRSQYKYYVQLTIEGEKPQKGRTLGKGNVGIDLGPTTVAVSGENVVSIDKLASNCDNIQEEITRLSRKIDRSRRANNPQNFNEDGTIKRGIKLVWNDSKRYKELRRELAELRRKQAAIRKQQHIDRANALLKEGDTFIVENNQISGWTTRAKETKVNEKTGKIQKKKRFGKSVANHAPSMFVSILENKVKSLGGEVVKVDTKNAASQYDFTDGSFTKHELKERNVTLSNGDTHQRDMLAAFNLQHLKLDETKTKQYDTETMAADYKRFCQLEQEEIQRYKNKEKKDDRGTVGAERL

SEQ ID NO: 3398 - protein, 1358 aa, unidentified
  REGION 1..1358: note = Description of Unknown: uncultivated organism sequence
  REGION 1..1358: note = Category: MG91 effectors
  REGION 1..1358: note = Description: MG91-590 effector
MEKEYYLGLDMGTNSVGWAVTDDAYNLIRFKGKDMWGIREFDEANPAVERRTHRTSRRREQRNAVRMGLIRSYFADEIQKVDSNFYQRLDNSFFHVEDKQDNVKDKNGIFNDKNYKDADYYKQYPTIFHLRKELIEDASQKDVRLVYLAVANMFKHRGHFLLSGIGSESSKQTITDLYNQVSGLITEEYGISLKTDIAGTDFEQVLCSREYSRTRKSEKVCEILEIKNSDKLKKAFVKSMCGLSVKITDIIDDTFTEISDEDKKITFSFVDSDYDEKAGVLEEKLGTDVYDIISKLKEIHDKAQVAEIMKNYQYLSFARVADYEKHKKDLKILKRVVKKHFEPTVYDKLFRSEENGTYSAYVNSFNSEEKSRRNYKERKQEDLYNSIKKLLKSVDNVDDTDIEYIKNEMDKENFLPKQLTFKNGVIPNQIHASELKAILKNAEKYLPFLNEKDESGYTVSERILKLFSFQIPYYVGPVSSNSNGWGKRLESGQVLPWNIDKKIDLKETSEQFIQRMVRNCTYIAGEKVLPKASLLYENFKVLNEINNLSINDERITVNLKQDLYNTLFLKGKRVTRKQIFNYFHSRGLVEEDSQISGIDIAVNNSLSTYGKFLPLFGEHLKEDKYKKMVDDIVFWCTVYGDSRKFLREQLEEKYSDVLDENQIKRITGMKFKDWGNLSKEFLELSGCCKSTGEMIPLIRAMWETNYNLMELLHSEEFTYSEELEEKQGKIEKVLSEYTIDDLNEEYFSAPVKRMVWQTLLIIKEIEKIMKCPPTRIFVEMTRKDDEKGDNGRKSSRKDQLLALYKKIQSEDKEWKKEMSSRIEDYDKNGALRSKKLYLYFIQKGLDMYTGKPIDLDNLMSANSNYDIDHIYPRHFVKDDNINNNLVLASKPANAEKSDIYPIKDSIYQKMKYTWKVLRDEGLITEEKYKRLTGRNPFTDEQKAGFIARQLVETGQGTKGVADLLTALLPDTKLVYSKAGNVSDFRKRYDIPKSRLINDFHHAHDAYLNIVVGNIYFTKFTSNPLNYIRKECSSKDNKYQYNLGNMYKWDVKRDGKTAWIAAKEGETGTIATVKKILSRNTPTLTRLTIEGHGGIADATLYSHKKAKQDAYIPLKSSDARMADVTKYGGYSSVTTAYLFLVEHEIKGKKIRTLETVPLYLKDRLENSKEKLEEYCRETLGYTNPSVRMKKIKLQSLIKLNGYYMQISGRTGNRFTLRNYVQLCLNGKWVDYIHKLEKYQDKGFIDNVITDEKNVELYNVLCEKHSVGIFTLRPNPVGDKIKKGYDKFVNLTTEEQIKLLIEIIKLTCVGIVSANLTLIGGASISGKMLISKNITDAKECLLINQSVTGLYENRIDLLRV

SEQ ID NO: 3399 - protein, 524 aa, unidentified
  REGION 1..524: note = Description of Unknown: uncultivated organism sequence
  REGION 1..524: note = Category: MG91 effectors
  REGION 1..524: note = Description: MG91-591 effector
MNEVFVLELPLQVEKYQADILNKRYEQLRQLYNYVQGKLLRQYRYFEQMVDYQACKSIREKKDFLKNHPFHINGVLDKSGDQLDITFDEYGIQGFVEKLIHKSVGENTSYADLGFNTLILDYLSASIWRAWDKKLYDLKARRISFKKYGELDSFSSRRKVVRGMVYFSGMELHLDTMELAIKMNGKLGNNAKFITLKMLHNPKHAEYEMWALKGGVDSVKVLKVVRRLVRSQYKYYVQLTIEGEKPQKGRTLGKGNVGIDLGPTTVAVSGKNVVSIDKLASKCDNIQEEITRLSRKIDRSRRANNPQNFNEDGTIKRGIKLVWNDSKRYKELRRELAELRRKQAAIRKQQHIDRANALLKEGDTFIVENNQISSWTTRAKETKVNEKTGKIQKKKRFGKSVANHAPSMFVSILENKVKSLGGEVVKVDTKNAASQYDFTDGSFTKHELKERNVTLSNGDTHQRDMLAAFNLQHLKYDEKDTKQYDTEAMTADYERFCQLEQEEIQRYKNKEKKDDKGTIGAEKL

SEQ ID NO: 3400 - protein, 1136 aa, unidentified
  REGION 1..1136: note = Description of Unknown: uncultivated organism sequence
  REGION 1..1136: note = Category: MG91 effectors
  REGION 1..1136: note = Description: MG91-592 effector
MSNKILSLDLGITSIGYSILEEMKNDRYSLLDYGISMFDKPTDKDGNSKKLLHSQSVSTTKLYDLRKERKQNLASLFEEFHLSTKALLLNQEKQNVYIQKWELRAKKAFEEKLEVGELFTIFYALAKHRGYKSLDSGDLLEELCVNLGIEREQSNNKKKDDDEKGKIKNALKTIENLRLDFPEKTVAQIIYETELQKENPTFRNHDNYNYMIRREYINDEIKKIIVFQKEFGFFSSNFDVEEFTSSIIATIDDQKDSTNDMSLFGFCEYYKDEEQKVAHQYSLLSDIYKMYESVSNINFNANPTIKITPEQIKLVADDFFTKVKKGKSIADIKYKDIRKILNLDDDFKIFNKDDSYSNKGKQQENRIIKFHFVNNLSKINNQFIVDIFEKENRYELLKEIFDVLAYEKAPHAIYEQLKDKIKDEKTIIDLIKYKSGNSLNISHYAMMKFIPYFEQGLNTDEIKEKLGLDRKEDYSSFKKGIKYLHINRFEEDDNLKINNHPVKYVVSATLRVIKHLHSIHGAFDEIRVESTRELSQNEQTKKDIEKANRVFEKELDAIVDDVEYQKIAEQYGKNLRKYARKILMYKEQEGRDIYSGEGIELKDIFTNIVDLDHIIPQSLGGLSVKHNFVLAHRDTNVQKSNQLPLNFVKEKQAFINRVEYLFEHHKINWKKKKNLLATTLEESFVDTFESKPLRATSYIEALTAQVLKRYYPFPNEKKESDGSAVRHIQGRATSNIRKLLGVKTKVRDTNIHHAIDAILIGFTNHSWLQKLSNTFRENMGVIDDEARSNIKKETPIIELIVNDEVEYLSPKELCEKIEESYNEFGEDSVFYRDVWGKVKVVNFWVSQKPMVSKIHKDTIYSKKRDSIFTVRENIINKFVLLKITSTTSSQKFMENFEKNILKKMYLFKTNPKDVICQIVQNRAKNIATLLDTFMEIDTENKEQISDAKGKLEQLMHKDLLDNNANIIRKIKFYQTNLTGFDVRGGLATKEKTFIGFRAWLEGENLQYERIDIANFDKIKKENDSSFKIYKNDVVFFVYADGSYRGGKIVSFLDYKGIASFSNSNYPALSEYQPKSFCKMGKDKHGNPKKSGAKQQTINASIGIIKLNLDITGNIRSYQVIGNVQSELLDFIKGIIK

SEQ ID NO: 3401 - protein, 507 aa, unidentified
  REGION 1..507: note = Description of Unknown: uncultivated organism sequence
  REGION 1..507: note = Category: MG91 effectors
  REGION 1..507: note = Description: MG91-593 effector
MKEQILSYELTLPQRIYPHLDRLFSVFKNQVNSYIPKLWNEKGFKLLSQKGSAVGILKKEFPTPEGIPSRVFRNVLELTGQIIRSQIERKEVFEKLLKGEEIKGYSKNFVLNIQRQIENLRKKGKEISCYFDLPHPKFNGQIVITSADDNLEKGQFRRLKISGNFLEFSIKVPTQKGWDWIKVKKLIPERLRRALTKAKEVKAVLIKKVLLKSGYHIYRLVIPLSFEVKEPENVERVLALDLSPSEKRLGTAVLVEGEKVSKPLFFKTQMLRKVERLHFEVSNLERKIDNIYNSIEKTACKREKERLWERLRHLFVEQKLRQRKIKQLRKEILETFTNLVIAHAKVYDCQAIVVEDLSFKEVPDWKDKKALRRFSQWFYSRFASRLEEKARLYNLKVIKVNPAHTSRICHKCGKEGKTERLVFKCSCGKYDRDYNASVNIAFRLTKPKAQRAEGIPGRFPSRLVQVEWKALLSFISFSKLLAWLRVVETSQLKLKKLLKRVYSDKYG

SEQ ID NO: 3402 - protein, 534 aa, unidentified
  REGION 1..534: note = Description of Unknown: uncultivated organism sequence
  REGION 1..534: note = Category: MG91 effectors
  REGION 1..534: note = Description: MG91-594 effector
METNSLILSYELTLPQRIYPKLDRLFSVFKWEVRDLISELWNEEGFKLLKEKNSACSILKSIIERPPGIPSRVYRNILELSGQIIRSHLERKRIFDYIIEKPCRVLCDEKDIAKDLNTSSLFVLNVQNQIKNFLQKEKEKKDYFSVIEPNFSGNVIITSADDNLEKGQFRRLKIEGNKITFEIKVPTFEGWEWIKVKKFIPDRLKKVLSRAKDIKAPLIKRVFLKSGFTIYRLVIPVEIEVKVEERIERVFAIDLSPSEKRLGVGVVVSESGYSKPVFFSAYKKIKKLERLYREISNLERKIDNIGDQIHGTLKREHRERLYQRLEHLFEEQKLRWRKFKELREQILEIFVNFVIEHARGYCCDAIVIEKLEFKGLPAWNNKRFRRLFSLWFYSRFSKRLEHKALRNGLRVIKVDSCGNSKICHICGSEGKVNKLEFYCLRCQRRFDRDYNGAVNIGIKALRVCRTKPKPYKGKGIPGRVPFPQVPTHQVLPFKFKVLLFTISFLKLLSYLRVVETSYLKFGRLTGLVGSDKYG

SEQ ID NO: 3403 - protein, 473 aa, unidentified
  REGION 1..473: note = Description of Unknown: uncultivated organism sequence
  REGION 1..473: note = Category: MG91 effectors
  REGION 1..473: note = Description: MG91-595 effector
MRQDPEWRRALGMVKGKERNELFRRLNRQYRLTEFDFHADIARHREGTKRKSELGINEAQKLATQAFNAVSRYMFKQGGRPRFKSFKRGLHSIEGKTNKTGLKFKPDQMILDWCRKTYQVMLDPKDAYALDALYADKERTQFKRIKYNRIVCRNIKGVKRFYLQVVLEGTPPVKHAYAPASERMAIDPGPKAFAVFCPRVQAKVQVAPRAKVNEKAIRRIQRSMDRSLRATNPNAFDEKGRIKPGVSLAYSKGYQVHLTNLREAHRKAAGTRKCEHGELANLLLECAGNIRIEKNSWEAFKRSHFGRSINNSAASGFIQRLKSKAERAGLTVEEISPFRLKPSQYDPYKDEFVKKALGERWMYLGDESTVIQRDIMSAILIYFADLKNQTHNPEVVKASLEGLKRGLTDAGYVKHLKLPRSSGSKDPLFAPEPKALTTEELRSKCFRVASNSHSSTLNGTDGKAVGWSETFWL

SEQ ID NO: 3404 - protein, 530 aa, unidentified
  REGION 1..530: note = Description of Unknown: uncultivated organism sequence
  REGION 1..530: note = Category: MG91 effectors
  REGION 1..530: note = Description: MG91-596 effector
MKTGSVIVSYELTLPQRIYPHLDRLFSVFGRSVRDFIDRFWNESTLELLSQKGHVCSIIKEIVQKPQNLPSRVFRNALELSGQILRSQIERKKLFDTFMQYPCLVLYDEKEIAKSLNTSIWFALNVKRQVLKLLRKGERGDYFSLVKPSFSNSVVITSADDSLERGQFKKLRIEKNKLLFELKVPIGNTWKWVKVTKFIPDRLRKALRNAKEIKAPLIKRVTLKSGFTIYRLVIPVEVELRVKNRVERVFALDLSPSEKRLGVGVVVDKEGHSKPVLFTAYKMVRKLERLYGEISGLERKIDNIADDLHSTFKKGHKERLNQRLRHLYQEQKLRWRKFKELRKQILETFINLVIAHAKAYSCDAIAIEDLKFKDLPDWENKRFRRLFSTWFYSRLEERLRHKAQREGIKVLSVNPFNTSQVCHECGSKGKANRFEFVCESCGKRFDRDYNASVNIGIKALTLACKTKSKPYMGEDIPARVSSLQVLTRYKFKALLTLLSFLKLLAYLRLVETSYLKLKSLLKCISADKYG

SEQ ID NO: 3405 - protein, 529 aa, unidentified
  REGION 1..529: note = Description of Unknown: uncultivated organism sequence
  REGION 1..529: note = Category: MG91 effectors
  REGION 1..529: note = Description: MG91-597 effector
MNTPSFVIELPIRTDDHERRTIVGKLEYARCLHNATLGTALGQLQQMRQDPAWKKACRMPKGKERTNAFRALDRQYGLTEYDLHAVIARHRQGSGRKEELGINETQKIATRIFQAVSRYKLGLGGRPRFKSQSRGLHSIEGKTNKTGLKFKPETSTLDWCGHEYRVLIDQRDGYLQRALREEADPKRWRKVKYCRLVRKRIRGKERFYLQVVLEGTAPLKRVYAPVVERLAIDPCPQTVAVFCPRFAGKIEVAPHAKVDEAELRVLQRSMDRSLRSCNPKAYNEDGTIKPGVELVKSKGYLKRVARLQELYRKAAAARKCDHGQLINLLLCLAGEIRIEKNSWAAFQRSHFGKSLGRSGVADCLSQLKAKAESAGLKVIEAAPYKLKLSQYDPYTDSFQKKQLNERWHRAGTGDEYIQRDVLSAALLYCADLETQSHIPKAALALLEGAKQLLKDAGYWVSKPTSSQDPCDPRFAPEPKALTPETVRLEIFGGTGDSHLQPSCPNGSKGAEGKVSACSKETFALERGVV

SEQ ID NO: 3406 - protein, 1359 aa, unidentified
  REGION 1..1359: note = Description of Unknown: uncultivated organism sequence
  REGION 1..1359: note = Category: MG91 effectors
  REGION 1..1359: note = Description: MG91-598 effector
MQEKPYYLGLDMGTNSVGWAVTDQHYNLLKAKGKDLWGIREFIEADTSVERRTHRISRRRRQREQARIGLLNDYFHDAIIAIDPSFFQRLENSKYHLEDKDQNVRYKYNIFNDPDYTDADYYTQYPTIYHLRKELLENPKPHDVRLVYLALLNMFKHRGHFLNSGISDGNNERSLKDAYINFAISVSELTEDYFNQDVDYSTIEGILSSRDLNRTKKAEELSTVLGIDFKNKKYKEYLRAICGLKINAYTLFSDQLPDDTTKIDLCVSDASFDEKSEELVSLIGEDLFQIILNIKEIYDIGSLAGILKGYTYLSQARVAAYDKHKHDLKLLKSSIKKYCTKEEYNNFFNSDADGSYASYIGSFNSGNKERRVGSKRTSEDLYKEIKKLLKGANKSDPAINEFFTSIETESFLPKQLTASNGIIPNQVHSKEMARILTNAENYLPFLKETDENNLSISNRILQLYKFQIPYYIGPVTEKSQRDGGNGWVIRKDNGRVFPWNIEEKIDVKATSEAFISRMVRRCTYMNGNQVLPKASLEYESFRVLNEINNLRIDGERIPVTLKQDIYTDLFQKGKKVTKKQLCNYLATRGLIESSEQVTGIDIAINNSLSTYGKFKAILGEDIKLDHIQHMIEDIVFWCTVYGDSKQFLKEQIEDKYKGKLSPEQMKRILGFKFKDWGNLSKEFFELKGTDKSTGEAVSIIRALWENNLNLMELINSPEFDFKERLADYEANSLKTLSDFEPEDLNEYYFSAPVRRMIWQTTLIIKELVHVLGEEPARIFIEMTREKDASRGRTLSRKKKFEHLYKNVKDENTDWAKVIEHADESGTIRSKKMYLYLTQKGRCMYTGNHIELSDLFNDNLYDIDHIYPRHFVKDDNIDNNLVLVTKEKNAHKSDNYPLEAEIFNKQRNMWTQLRKEGFISEEKYNRLMGRNAFTDEQKAGFIARQLVETSQGTKGVAELFHQLLPNSKLVYAKAGNVSDFRNNRELPKSRLVNDFHHAHDAYLNIVVGNVYYVKFTQNPMNYIKNSYNKDMNKNNYNLSRMFDWDVKRGDEVAWVAQKQDGAAGTISTVKKMLSKNTPLMTRLSYEGKGALANETLYSAEKAKGEGYIPFKSSDAKIQDVTKYGGFTSVTGAYFFLVEHDQKKKRIRTIESVPLYLADKIDKDSSELERYCDKLGLVNYDIRVRKIKIGSLLNRNGYFAYLTGKTGKQLILRNATNLCLDKKWTRYIKKIEKYKETNVLDSIITSETMVNLYNELLNKFTVGIYGRRPNPIGEKMDSAKNTFTSYTLDNQCNLIYQILQLSKILGFETDLSLLRTNKQSGKPTREGGMQISKKIDNTTSMYLINQSPTGLFETKIDLQTI

SEQ ID NO: 3407 - protein, 524 aa, unidentified
  REGION 1..524: note = Description of Unknown: uncultivated organism sequence
  REGION 1..524: note = Category: MG91 effectors
  REGION 1..524: note = Description: MG91-599 effector
MNEVFVLELPLQVEKYQADILNKRYEQLRQLYNYVQGKLLRQYRYFEQMKEYQICKTFREKRDFFKSHPFQINEKLKGNKTPFKVSFDEYSLKGYIEKLVQKQVAPNMTYADFGFTTNILDHLGASIWAAWDKMLYDFKAKRISFKKYGELDSFSSRRKVVRGVVYFSGMELHLDTMELAIKMNAKVGKEAKFITLKMLHNPKHADYEMWALKGGVDSVKVVKVVRRLVRSQYKYHVQLTIEGEKPQKGRTLGKGNVGIDLGPTTVAVSGENVVSIDKLVSKCDNIQEEITRLSRKIDRSRRANNPQNFNEDGTIKRGIKLIWNDSKRYKELRRELAELRRKQAAIRKQQHIDRANALLKEGDRFIVENNQISGWTTRAKETKVNENTGKIQKKKRFGKSVANHAPSMFVSILENKVKSLGGEVVKVDTKNAASQYDFTDGSFTKHELRERHVTLSNGDTHQRDMLAAFNLQHLKYDEKDTKQYDTEAMAADYERFCQLEQEEILRYKNKEKKDDRGTIGAEKL

SEQ ID NO: 3408 - protein, 490 aa, unidentified
  REGION 1..490: note = Description of Unknown: uncultivated organism sequence
  REGION 1..490: note = Category: MG91 effectors
  REGION 1..490: note = Description: MG91-600 effector
MARENENSGCFVVTFPLKTEKWQEDRIDKILTLLTVRYREKQKILLDRYIHLSHSPEFKEAKKTGLKAFRDFMNEHNFTKYDVEKVFSDSSLSKSVTADIMLTHGINSSIMQELSHRAWSAWEKKLYGQGKFIKLDNEVNIFKSRLKGSTITGFEYSFTDMTLSMNATKPKKHTMFTIPFVVNRKSEYEAYALGCEVRNIAIMRQQIRGKNKYYVQFSFAGTPYNKGRKMGTGIVGIDPGPSKIAIVSDSEIRITTLAPSVNRDERAICRMQRKLDRSRRATNPDNYNDDGTIKRGIKLTFEKSNSYKRTQAKLADTQRKLAAKRKIDHNILANEIIAMGNEFHVENNSFKSMQARSKETKKNDKGKNMSKKRFGKSLANRAPSELLTILKNKVNQYADGDYVDIPSGVACTQFDFTNGEFTKHELKERTITTSDGVVHDRDALAAFNMRFVHKKKIEGKKKIEKDKENFDILAMTDAYRQFCSLEKNIK

SEQ ID NO: 3409 - protein, 504 aa, unidentified
  REGION 1..504: note = Description of Unknown: uncultivated organism sequence
  REGION 1..504: note = Category: MG91 effectors
  REGION 1..504: note = Description: MG91-601 effector
MFDAPSGADHLIKMRATAEWQTARAMPKSSERTKAFRDLRVRFRLSEYDFHADVAMHRKASGRGHLLGINECQKLASRAWISVERHLYNGGSPRFISSRRGLHSIEGKTNRTGIIWKADQQCVTVCKHVYRVRVDKRDDWLTRALQDPTDPTKPRKVKYCRIVREMRKGKERFLLQLVAEGTSPLKHAYAGKDLRMAIDPGLGSLTYATEDGTIAKVQIAPSADTDHRAIRRIQRAMERSRRATNPDNYEAVDVVRHGKKKKSFKVKSGRLQWRFSKRYESLRAELAEIFRLSAATRKREHGEVCNWLLGHAGHIIVEDNSYKAFQRGRFGKTIGRHAPAALYAQLASKAESAGLLVEVVSPKKLKPSQHNLLTDTFVKHELWERRVRLGNDDDDRWIDRDAAACLNLLYADLEKQTYAPERIREAVLAGVTAWLDAGVVVIQAREGITEREFGRFRRRGIPSLTVQGLRQQGFRGRSDSKSGATPRRKASTVSKPSHFSGEVV

SEQ ID NO: 3410 - protein, 529 aa, unidentified
  REGION 1..529: note = Description of Unknown: uncultivated organism sequence
  REGION 1..529: note = Category: MG91 effectors
  REGION 1..529: note = Description: MG91-602 effector
MNTPSFVIELPIRTDDHERRTIVGKLEYARCLHNATLGTALGQLQQMRQDPAWKKACRMPKGKERTNAFRTLDRQYGLTEYDLHAVIARHRQGSGRKEELGINETQKIATRIFQAVSRYKLGLGGRPRFKSQSRGLHSIEGKTNKTGLKFKPETSTLDWCGHEYRVLIDQRDGYLQRALREEADPKRWRKVKYCRLVRKRIRGKERFYLQVVLEGTAPLKRVYAPVVERLAIDPCPQTVAVFCPRFAGKIEVAPHAKVNEAELRVLQRSMDRSLRSCNPKAYNEDGTIKPGVELVKSKGYLKRVARLQELYRKAAATRKCDHGQLINLLLCLAGEIRIEKNSWAAFQRSHFGKSLGRSGVADCLSQLKAKAESAGLKVIEAAPYKLKLSQYDPYTDSFQKKQLNERWHRAGTGDEYIPRDVLSAALLYCADLETQSHIPKAALALLEGAKQLLKDAGYWITKPTSSQDSRDPRFAPEPKALTPETVRLEIFGGTGDSPLQPSCPNGSKGAEGKVSACSKETFPLQRGVV

SEQ ID NO: 3411 - protein, 525 aa, unidentified
  REGION 1..525: note = Description of Unknown: uncultivated organism sequence
  REGION 1..525: note = Category: MG91 effectors
  REGION 1..525: note = Description: MG91-603 effector
MEEVFVLELPLQVEKYQEDILNKRYEQLRQLYNYVQGKLLRQYRYFEQMKEYQTCKTFKEKRDFFRSHPFHINGVYGNNKELLDITFDEYGINGFVGKMGKKLVNADTTYADLGITSTLLDRLSLAIWAAWEKMLYDYHAKRISFKKYGELNIFGSRKKTNGSGKKMFSGMELHLETMTLSIKLNGKVGKNAKFITLPILHNPKHVDYEMMALKGGFDSVKVITVVRRMVRGRYKYYLQMSIEGEKPKKGRTLGKGNVGIDLGPTTIAVSSENIASIDKLASKCDNIEVEKKRLGRKIDRSRRANNPGNFNEDGTIKRGVRLTWNDSKRYKALRREMAELQRRQAAIRKQQHINRANALLKEGNTFIVENNQISGWTRKAKETKVNEKTGRIQKKKRFGKSVANHAPAMFVTILENKVKSLGGEVVKVDTQNAASQYDFTNNSFEKHELKERSVTLSNGDIHQRDMLAAFNLQHLKYDESEKKQYDREAMAQHYERFCELEQEEIMRYKSKEKKDDRSTIGAEKL

SEQ ID NO: 3412 - protein, 484 aa, unidentified
  REGION 1..484: note = Description of Unknown: uncultivated organism sequence
  REGION 1..484: note = Category: MG91 effectors
  REGION 1..484: note = Description: MG91-604 effector
MAHKENQKAFVVTFPLRTEKWQEDRIDKMMRMLTTFYNDRQRKLVRRYIYLSHSKAYKEAKGKGVVAFKNYMKEHGFSQYGLDAFFKADTKGALYQCGLNSMFLQYLSQCAWSAWDKKLFGKGDFVKTDKVVNIFCSRNMKGRFCGFDYDLRTFTIRIKSICTKEIICSIPFVVNKNSEYELYALSQKICRIGIVRKLIRSKYKYYVQFTFDGVPYNKGRNIGTGIVGIDPGPSKIAIVGDKKVEIAKLAPNIIEDERKTARLKRKLDRSRRATNPHMYKEDGTNIKGQRQICFSKSYNETRKQLADAQRKLAAKRKIAHNELANTLLEYGDTFKVEANSYKSMQARTKATSMTKSGRIRSKKRYGKSIKNRAPSEFLVILKNKLLYYPKGKYYDVPSSYACTQFDFTNESFTEHKISERRIVTSDGIQHNRDTLAAFNIKNAIVNDTSTKKKKVTKSKEFFDIVKMKASYNEFCVMEHYLLSE

SEQ ID NO: 3413 - protein, 530 aa, unidentified
  REGION 1..530: note = Description of Unknown: uncultivated organism sequence
  REGION 1..530: note = Category: MG91 effectors
  REGION 1..530: note = Description: MG91-605 effector
MTSQSFVIELPIAVDDAEMRTIVRKLEFARQLHNATLGTAMGQLQLMRQDAAWKEACVMPKGKERAAAFRALDRKYGLTEYDLHSVIARHREGTGRKAELGINETQKIATRVFQAINRYKLGLGGMPRFKSFKRGLHSIEGKTNKTGLKFKPEQKVLNWCGHDYRVLIDPKDDYIQRALKDNERSDQYRKIKYCRLVRRRIRSADRFFLQVVLEGTAPVKHVYAPVTERAAIDPGPQSIALFSKAFAGKIQVAGSNNFNEAASRRLLRAMDRSLRRNNPDAYNEDGTINKGVKLAKSKNYQRKVDRLHEMHRVAAAQRKCRHGQTINLLLSIAGDIRIEKNSWKAFQRGHFGKSLGKSAMSGFIAQLKSKAESAGLKVTEVNPYKLKLSQYDPYTDTYRKKDLSERWQEMKAGSGQYIQRDVLSALLLYCADIEKEIHIPKAAVEQLEGAKQLLTDAGYVVLKSTSSRDQRDPRLASEPKAMTPEMARQKILRGAGDSHLPTDQELGRIRAGGKVSTWSKETFPLQRGVV

SEQ ID NO: 3414 - protein, 405 aa, unidentified
  REGION 1..405: note = Description of Unknown: uncultivated organism sequence
  REGION 1..405: note = Category: MG91 effectors
  REGION 1..405: note = Description: MG91-606 effector
MPRFKSSKRGLHSIEGKTNKTGLKFRPEKKVLNWCGHDYRVLIDPKDDYIQRALKENERSDKYRKIKYCRLVRKRIRSSDRFFLQVVLEGTAPVKHVYAPVTERAAIDPGPQSIALFSKEFAGKIQVAGSNNFNEAVSRRLLRAMDRSLRRNNPDAYNEDGTIKKGAKLVKSKNYQRKVDRLREMHRVAAAERKCRHGQTINLLLSIAGDIRIEKNSWKAFQRGHFGKSLGKSAMSGFIAQLKSKAASAGLKVTEVNPYKLKLSQYDPYTDTYRKKDLSERWQEMKAGSGLYIQRDILSALLLYCADIEKEIHIPKVAVEQLEGTKQFLTDAGYVVLKSTSSRDQRDPRLASEPKAMTPEMARQKIFRGAGDSHLPTDQELGQIRAGGKVSTWSKETFPLQRGVV

SEQ ID NO: 3415 - protein, 529 aa, unidentified
  REGION 1..529: note = Description of Unknown: uncultivated organism sequence
  REGION 1..529: note = Category: MG91 effectors
  REGION 1..529: note = Description: MG91-607 effector
MNTPSFVIELPIRTDDHERRTIVGKLEYARCLHNATLGTALGQLQQMRQDPAWKKACRMPKGKERTNAFRALDRQYGLTEYDLHAVIARHRQGSGRKEELGINETQKIATRIFQAVSRYKLGLGGRPRFKSQSRGLHSIEGKTNKTGLKFKPETSTLDWCGHEYRVLIDQRDGYLQRALREEADPKRWRKVKYCRLVRKRIRGKERFYLQVVLEGTAPLKRVYAPVVERLAIDPCPQTVAVFCPRFAGKIEVAPHAKVNEAELRVLQRSMDRSLRSCNPKAYNEDGTIKPGVELVKSKGYLKRVARLQELYRKAAAARKCDHGQLINLLLCLAGEIRIEKNSWAAFQRSHFGKSLGRSGVADCLSQLKAKAESAGLKVIEAAPYKLKLSQYDPYTDSFRKKQLNERWHRAGTGDEYIQRDVLSASLLYCADLETQSHIPKAALALLEGAKQLLKDAGYWVSKPTSSQDPCDPRFAPEPKALTPETVRLEIFGGTGDSPLQPSCPNGSKGAEGKVSACSKETFPLQRGVV

SEQ ID NO: 3416 - protein, 525 aa, unidentified
  REGION 1..525: note = Description of Unknown: uncultivated organism sequence
  REGION 1..525: note = Category: MG91 effectors
  REGION 1..525: note = Description: MG91-608 effector
MEEVFVLELPLQVEKYQEDILNKRYEQLRQLYNYVQGKLLRQYRYFEQMKEYQTCKTFKEKRDFFRSHPFHINGVYGNNKELLDITFDEYGINGFVGKMGKKLVNADTTYADLGITSTLLDRLSLAIWAAWEKMLYDYHAKRISFKKYGELNIFGSRKKTNGSGKKMFSGMELHLETMTLSIKLNGKVGKNAKFITLPILHNPKHVDYEMMALKGGFDSVKVITVVRRMVRGRYKYYLQMSIEGEKPKKGRTLGKGNVGIDLGPTTIAVSSENIASIDKLASKCDNIEVEKKRLGRKIDRSRRANNPGNFNEDGTIKRGVRLTWNDSKRYKALRREMAELQRRQAAIRKQQHINRANALLKEGDTFIVENNQISGWTRKAKETKVNEKTGRIQKKKRFGKSVANHAPAMFVTILENKVKSLGGEVVKVDTQNAASQYDFTNNSFEKHELKERSVTLSNGDIHQRDMLAAFNLQHLKYDEAEKKQYDREAMAQHYERFCELEQEEIMRYKSKEKKDDRSTIGAEKL

SEQ ID NO: 3417 - protein, 544 aa, unidentified
  REGION 1..544: note = Description of Unknown: uncultivated organism sequence
  REGION 1..544: note = Category: MG91 effectors
  REGION 1..544: note = Description: MG91-609 effector
MNLDSRVMNVSPRIVIRQSKVKEVFVLELPLRVEKYQADLLNKRFEQLRQLYNYVQGKLLRQYRYFEQMKEYQACKTFKEKKDFFRKHPFHINGILGSNKKPLNITFDEYGIRGFVEKLVQKGVGASMTYADLGFTTSILDHLSSGIWSAWDKMLYDYKARRISFRKYGELDSFSSRRKVVQGKIYFSGMELHLDSMMLSVKMNGKIGKAAKFITLPILHNPKHANYEMWALRGGLDSVKVVKVVRRLIRGQYKYYFQMTIEGEKPQKGRTLGKGNVGIDLGPTTVAVSSENIVSIDKLASKCDSIEAEKAKLGRKIDRSRRANNPQNFNEDGTIKRGVRLVWNDSKRYKALRGEMAELQRRQSAIRKQQHIDRANELLKEGDIFIVENNQISGWTRKAKETRVDESTGRIRKKKRFGKSVANHAPSMFVNILENKVKSLGGQLVKVDTQNAASQYDFTDGSFTKHELQERNVTLSNGDTHQRDMLAAFNLQHLKYDEAEKKQYDREAMSKHYERFCELEQAEILRYKNKEKVDDRSTIGAKEL

SEQ ID NO: 3418 - protein, 530 aa, unidentified
  REGION 1..530: note = Description of Unknown: uncultivated organism sequence
  REGION 1..530: note = Category: MG91 effectors
  REGION 1..530: note = Description: MG91-610 effector
MTSQSFVIELPIAVDDAEMRTIVRKLEFARQLHNATLGTAMGQLQQMRQDAAWKEACVMPKGKERAAAFRALDRKYGLTEYDLHSVIARHREGSGRKAELGINEAQKIATRVFQAINRYKLGLGGMPRFKSSKRGLHSIEGKTNKTGLKFRPEKKVLNWCGHDYRVLIDPKDDYIQRALKENERSDKYRKIKYCRLVRKRIRSSDRFFLQVVLEGTAPVKHVYTPVTERAAIDPGPQSIALFSKAFAGKIQVAGPNNFNEAASRRLLRAMDRSLKRNNPDAYNEDGTIKKGAKLVKSKNYQRKVDRLREMHRVSAAERRCLHGQTINLLLSIAGDIRIEKNSWKAFQRGHFGKSLGKSAMSGFIAQLKSKAASAGLKVTEVNPYKLKLSQYDPYTDTYRKKDLRERWQEMKAGSGLYIQRDILSALLLYCADIEKEIHIPKVAVEQLEGAKQFLTDAGYVVLKSTSSRDQRDPRLASEPKAMTPEMARQKILRGAGDSHLPTDQALGRIRAGEKVSTWSKETFPLQRGVV

SEQ ID NO: 3419 - protein, 530 aa, unidentified
  REGION 1..530: note = Description of Unknown: uncultivated organism sequence
  REGION 1..530: note = Category: MG91 effectors
  REGION 1..530: note = Description: MG91-611 effector
MTSPSFVIELPIAVDDAEMRTIVRKLEFARQLHNATLGTALGQLQQMRQDTAWKQACAMPKGKERTAAFRALDRKYGLTEYDLHSVIARHREGTSRKAELGINETQKIATRVFQAINRYKLGLGGMPRFKSSKRGLHSIEGKTNKTGLKFRPEKKVLNWCGHDYRVLIDPKDDYIQRALKENERSDKYRKIKYCRLVRKRIRSADRFFLQVVLEGTAPVKHVYAPVTERAAIDPGPQSIALFSKAFAGKIQVAGSNNFNEAASRRLLRAMDRSLRRNNPDAYNEDGTIKKGAKLVKSKNYQRKVDRLREMHRVAAAERKCRHGQTINLLLSIAGDIRIEKNSWKAFQRGHFGKSLGKSAMSGFIAQLKSKAASAGLKVTEVNPYKLKLSQYDPYTDTYRKKDLSERWQEMKAGSGQYIQRDILSALLLYCADIEKEIHIPKVAVEQLEGAKQLLTDAGYVVLKSTSSRDQRDLRLAPEPKAMTPEMARQKILRGAGDSHLPTDQELGRIRAGGKVSTWSKETFPLQRGVV

SEQ ID NO: 3420 - protein, 1358 aa, unidentified
  REGION 1..1358: note = Description of Unknown: uncultivated organism sequence
  REGION 1..1358: note = Category: MG91 effectors
  REGION 1..1358: note = Description: MG91-612 effector
MEKEYYLGLDMGTNSVGWAVTDDAYNLIRFKGKDMWGIREFDEANPAVERRTHRTSRRRKQRNAVRMGLIRSYFADEIQKVDSNFYQRLDNSFFHVEDKQDNVKDKNGIFNDKNYKDADYYKQYPTIFHLRKELIEDASQKDVRLVYLAVANMFKHRGHFLLSGIGSESSKQTITDLYNQVSGLITEEYGISLKTDIAGTDFEQVLCSREYSRTRKSEKVCEILEIKNSDKLKKAFVKSMCGLSVKITDIIDDTFTEISDEDKKITFSFVDSDYDEKAGVLEEKLGTDVYDIISKLKEIHDKAQVAEIMKNYQYLSFARVADYEKHKKDLKILKRVVKKYFEPTVYDKLFRSEENGTYSAYVNSFNSEEKSRRNYKERKQEDLYNSIKKLLKSVDNVDDTDIEYIKNEMDKENFLPKQLTFKNGVIPNQIHASELKAILKNAEKYLPFLNEKDESGYTVSERILMLFSFQIPYYVGPVSSNSNGWVKRLEPGQVLPWNIDKKIDLKETSEQFIQRMVRNCTYIAGEKVLPKASLLYENFKVLNEINNLSINGERITVNLKQDLYNTLFLKGKRVTRKQIFNYFHSRGLVEEDSQISGIDIAVNNSLSTYGKFLPLFGEHLKEDKYKKMVDDIVFWCTVYGDSRKFLREQLEEKYSDVLDENQIKRITGMKFKDWGNLSKEFLELSGCCKSTGEVMPLIRAMWETNYNLMELLHSEEFTYSEELEEKQGKIEKVLSEYTIDDLNEEYFSAPVKRMVWQTLLIIKEIEKIMKCPPTRIFVEMTRKDDEKGDNGRKSSRKDQLLALYKKIQSEDKEWKKEMSSRIEDYDKKGALRSKKLYLYFIQKGLDMYTGKPIDLDNLMSANSNYDIDHIYPRHFVKDDNINNNLVLASKPANAEKSDIYPIKDSIYQKMKYTWKVLRDEGLITEEKYKRLTGRNPFTDEQKAGFIARQLVETGQGTKGVADLLTALLPDTKLVYSKAGNVSDFRKKYDIPKSRLINDFHHAHDAYLNIVVGNIYFTKFTSNPLNYIRKECLSKDNKYQYNLGNMYKWDVKRDGKTAWIAAKEGETGTIATVKKMLSRNTPTLTRLTIEGHGGIADATLYSHKKAKQDAYIPLKSSDARMADVTKYGGYSSVTTAYLFLVEHEIKGKKIRTLETVPLYLKDRLENSKEKLEEYCRETLGYTNPSVRMKKIKLQSLIKLNGYYMQISGKTNKQFTVRNYVQFCLNSKWVDYIHKLEKYQDKGVIDDAITDEKNVELYNVLCEKHSVGIFTLRPNPVGDKIKKGYDKFVNLTTEEQIKLLIEIIKLTCVGIVSANLTLIGGASISGKMLISKNITDAKECLLINQSVTGLYENRIDLLRV

SEQ ID NO: 3421 - protein, 537 aa, unidentified
  REGION 1..537: note = Description of Unknown: uncultivated organism sequence
  REGION 1..537: note = Category: MG91 effectors
  REGION 1..537: note = Description: MG91-613 effector
MSTKSFTINLPIITGDQDRRRLQKSFSFGCNLQNAVMGGGWDCVLKMRATPEWQAARAMPKGSERTKAFRDLRVQFRLSEYDFHADVAMHRKASGRGHLLGINECQKLASRAWISVERHLYNGGSPRFISSRRGLHSIEGKTNRTGIIWKADQQCVTVCKRVYRVRVDKRDDWLTRALQDPTDPKKPRKVKYCRIVREMRKGKERFLLQLVAEGTSPLKHAYAGKDLRMAIDPGLGSLTYATEDGTIAKVQIAPSADTDHRAIRRIQRAMERSRRATNPDNYEAVDVVRHGKKKKSFKVKSGRLQWRFSKRYESLRAELAEIFRLSAATCKREHGEVCNWLLGHAGHIIVEDNSYKAFQRGRFGKTIGRHAPAALYAQLTNKAESAGLLVEVVSPKKLKPTQHNLLTGQFVKHELWERRVRLGNDDDDRWIDRDAAACLNLLYADLEKQTYAPERIREAVLAGVTAWLDAGVVVIQAREGITEREFGRFRRRGIPSLAVQGLRQQGFRGRSDSKSGVTPRRKASTVSKPSHFSGEVV

SEQ ID NO: 3422 - protein, 530 aa, unidentified
  REGION 1..530: note = Description of Unknown: uncultivated organism sequence
  REGION 1..530: note = Category: MG91 effectors
  REGION 1..530: note = Description: MG91-614 effector
MTSPSFVIELPIAVDDAEMRTIVRKLEFARQLHNATLGTALGQLQQMRQDTAWKQACAMPKGKERTAAFRALDRKYGLTEYDLHSVIARHREGTSRKAELGINETQKIATRVFQAINRYKLGLGGMPRFKSSKRGLHSIEGKTNKTGLKFRPEKKVLNWCGHDYRVLIDPKDDYIQRALKENERSDKYRKIKYCRLVRKRIRSADRFFLQVVLEGTAPVKHVYAPVTERAAIDPGPQSIALFSKAFAGKIQVAGSNNFNEAASRRLLRAMDRSLRRNNPDAYNEDGTIKKGAKLVKSKNYQRKVDRLREMHRVAAAERKCRHGQTINLLLSIAGDIRIEKNSWKAFQRGHFGKSLGKSAMSGFIAQLKSKAASAGLKVTEVNPYKLKLSQYDPYTDTYRKKDLSERWQEMKAGSGQYIQRDILSALLLYCADIEKEIHIPKVAVEQLEGAKQFLTDAGYVVLKSTSSRDQRDPRLASEPKAMTPEMARQKILRGAGDSHLPTDQALGRIRAGGKVSTWSKETFPLQRGVV

SEQ ID NO: 3423 - protein, 506 aa, unidentified
  REGION 1..506: note = Description of Unknown: uncultivated organism sequence
  REGION 1..506: note = Category: MG91 effectors
  REGION 1..506: note = Description: MG91-615 effector
MVVEVKFSPMTSPTFIIELPIRVSDSESRTILRKLEFARQLHNATLGTALGQLQQLRQDSEWEKACLMPKGKERSELFRKLDRKYQLTEYDLHTVIAKHRPRSGRKTELGINETQKIATRVFQAVNRYKLGLGGRPRFKSLSRGLRSIEGKSNKTGLKFNIEKSVLSWCKHDYRVFIDPQDDFLQRALRSEGRSGFKKVKYCRLVRKTIKGKNRFYLQVVLEGQAPIKHIYASTSERLSIDPGPQTIAVFSDVWAGKIKVSPTAQVDEKRLRCIQRSMDRSLRKSNPDCYESDGTLRKGCVLKKTKGYEKRIQRLQECHRKAAATRRCEHGQLINLLLSMAGDIRVEKNQWKAFQRGHFGKSLGKSGISGFIERLKSKAESAGLKVTEVKPYKLKLSQYDPYTDQYRKKSLNERWHSLGESSEWIQRDVMSALLLQCADLEEEKHIPTEVIKTLEGVKQLLRDAGYVILKPSSNGESNPTFASEPKAVTPEKVRLEIFCGASDSYL

SEQ ID NO: 3424 - protein, 524 aa, unidentified
  REGION 1..524: note = Description of Unknown: uncultivated organism sequence
  REGION 1..524: note = Category: MG91 effectors
  REGION 1..524: note = Description: MG91-616 effector
MNEVFVLELPLLVERYQADILNKRYEQLRQLYNYVQGKLLRQYRYFEQMKEYKACEKIKEKRDFFRAHPFHINGVLNGNKEQLDITFDKNGINGFVEKLAQKSAGPNITYADLGFTTYILDHLSASIWAAWEKKLYDFKAKRISFKKYGELDSFSSRRKVVGGKVYFSGMELHLDTMKLSIKMNGKQGDNAKFITLKMLHNTKHADYEMWALKGGVDSVKVVKVVRRLVRSQYKYYVQLTIEGEKPQKGRKLGKGNVGIDLGPTTVAVSGENVVSIDKLASKCDNIQEEITRLSRKIDRSRRANNPQNFNEDGTIKRGIKLIWNDSKRYKELRRELAELRRKQAAIRKQQHIERANALLKEGDTFIVENNQISGWTTRAKETKVNEKTGKIQKKKRFGKSVANHAPSMFVSILENKVKSLGGEVVKVDTKNAASQYDFTDNCFTKHELKERNVTLSNGDTHQRDMLAAFNLQHLKYDEAEAKQYDTEAMAANYERFCQLEQEEIQRYKNKEKKDDRSTIGAEKL

SEQ ID NO: 3425 - protein, 530 aa, unidentified
  REGION 1..530: note = Description of Unknown: uncultivated organism sequence
  REGION 1..530: note = Category: MG91 effectors
  REGION 1..530: note = Description: MG91-617 effector
MRTSSIIVSYELTLPQRIYPHLDRLFSVFGRSVRDFIDRFWNESTLELLSQKGHVCSILKEIVQKPQNLPSRVFRNALELSGQILRSQIERKKLFDTFMQYPCLVLYDEKEIAKSLNTSIWFALNVKRQVLKLLRKGERGDYFSLVKPSFSNSVVITSADDSLERGQFKKLRIEKNKLLFELKVPIGNTWKWVKVTKFIPDRLRKALRNAKEIKAPLIKRVTLKSDFTIYRLVIPVEVELRVKNRVERVFALDLSPSEKRLGVGVVVDKEGHSKPVLFTAYKMVRKLERLYGEISGLERKIDNIADDLHSTFKKGHKERLNQRLRHLYQEQKLRWRKFKELRKQILETFINLVIAHAKAYSCDAIAIEDLKFKDLPDWENKRFRRLFSTWFYSRLEERLRHKAQREGIKVLSVNPFNTSQVCHECGSKGKANRFEFVCESCGKRFDRDYNASVNIGIKALTLACKTKSKPYMGEDIPARVSSLQVLTRYKFKALLTLLSFLKLLAYLRLVETSYLKLKSLLKCISADKYG

SEQ ID NO: 3426 - protein, 525 aa, unidentified
  REGION 1..525: note = Description of Unknown: uncultivated organism sequence
  REGION 1..525: note = Category: MG91 effectors
  REGION 1..525: note = Description: MG91-618 effector
MEEVFVLELPLQVEKYQEDILNKRYEQLRQLYNYVQGKLLRQYRYFEQMKEYQTCKTFKEKRDFFRSHPFHINGVYGNNKELLDITFDEYGINGFVGKMGKKLVNADTTYADLGITSTLLDRLSLAIWAAWEKMLYDYHAKRISFKKYGELNIFGSRKKTNGSGKKMFSGMELHLETMTLSIKLNGKVGKNAKFITLPILHNPKHVDYEMMALKGGFDSVKVITVVRRMVRGRYKYYLQMSIEGEKPKKGRTLGKGNVGIDLGPTTIAVSSENIASIDKLASKCDNIEVEKKRLGRKIDRSRRANNPGNFNEDGTIKRGVRLTWNDSKRYKALRREMAELQRRQAAIRKQQHINRANALLKEGNTFIVENNQISGWTRKAKETKVNEKTGRIQKKKRFGKSVANHAPAMFVTILENKVKSLGGEVVKVDTQNAASQYDFTNNSFEKHELKERSVTLSNGDIHQRDMLAAFNLQHLKYDEAEKKQYDREAMAQHYERFCELEQEEIMRYKSKEKKDDRSTIGAEKL

SEQ ID NO: 3427 - protein, 529 aa, unidentified
  REGION 1..529: note = Description of Unknown: uncultivated organism sequence
  REGION 1..529: note = Category: MG91 effectors
  REGION 1..529: note = Description: MG91-619 effector
MKEVFVLELPLQVEKYQADILNKRYEQLRQLYNYVQGKLLRQYRYFEQMKDYQACKAFKEKREFFKTHPFHINGVLGRNKELLDITFNEYGILGWVTKLGQMSIGSGKTYADIGITARILANLSDNIWSAWNKKLYDYRSERISFKKYGSLNTFGSGKTILKKGKEIKEYFSGMVLHLERMEIDIKTNGSNGKNATFISLPILHNPKHADYEMMALSGGSSSIKVLTIVRRLVRGQYKYYLQLSIEGEKPQKGRTLGKGNVGIDLGPTTIAVSGENVVSIDKLASKCDNIQTEITKLARKIDRSRRANNPQNFNEDGTIKRGIKLVWNDSKRYKELRRELAELCRKQAAIRKQQHIDRANALLKEGDTFIVENNPVKAWAARAKETKVNEKTGKIQSKKRGGKSIGNHAPAMFVDILENKVKSLGGTFIRANTNNAASQYDFSNNSFKEGEDRHGLNERAITLSNGNTHQRDMLAAFNLQHLTDEKKQYDVEAMKRDYERFCQLEQEEIQRYKNKEKKDDRSTIGAEKL

SEQ ID NO: 3428 - protein, 537 aa, unidentified
  REGION 1..537: note = Description of Unknown: uncultivated organism sequence
  REGION 1..537: note = Category: MG91 effectors
  REGION 1..537: note = Description: MG91-620 effector
MSTKSFIISLPIITGDQDRRRLRKSFSFGCNLQNAVMGGGWDRVLKMRATAEWQTARAMPKNSERTKAFRDLRVRFRLSEYDFHADVAMHRKASGRGHLLGINECQKLASRAWISVERHLYNGGSPRFISSRRGLHSIEGKTNRTGIIWKADQQCVTVCKRVYRVRVDKRDDWLTRALQDPTDPTKPRKVKYCRIVREMRKGKERFLLQLVAEGTSPLKHAYAGKDLRMAIDPGLGSLTYATEDGTIAKVQIAPSADTDHRAIRRIQRAMERSRRATNPDNYEAVDVVRHGKKKKSFKVKSGRLQWRFSKRYESLRAELAEIFRLSAATRKREHGEVCNWLLGHAGHIIVEDNSYKAFQRGRFGKTIGRHAPAALYAQLTNKAESAGLLVEVVSPKKLKPTQHNLLTGQFVKHELWERRVRLGNDDDDRWIDRDAAACLNLLYADLEKQTYAPERIREAVLAGVTAWLDAGVVVIQAREGITEREFGRFRRRGIPSLTVQGLRQQGFRGRSDSKSGTTPRRKASTVSKPSHFSGEVV

SEQ ID NO: 3429 - protein, 525 aa, unidentified
  REGION 1..525: note = Description of Unknown: uncultivated organism sequence
  REGION 1..525: note = Category: MG91 effectors
  REGION 1..525: note = Description: MG91-621 effector
MEEVFVLELPLQVEKYQEDILNKRYEQLRQLYNYVQGKLLRQYRYFEQMKEYQTCKTFKEKRDFFRSHPFHINGVYGNNKELLDITFDEYGINGFVGKMGKKLVTADTTYADLGVTSTLLDRLSLAIWAAWEKMLYDYHAKRISFKKYGELNIFGSRKKTNGSGKKMFSGMELHLETMTLSIKLNGKVGKNAKFITLPILHNPKHVDYEMMALKGGFDSVKVITVVRRMVRGRYKYYLQMSIEGEKPKKGRTLGKGNVGIDLGPTTIAVSSENIASIDKLASKCDNIEVEKKRLGRKIDRSRRANNPGNFNEDGTIKRGVRLTWNDSKRYKALRREMTELQRRQAAIRKQQHINRANALLKEGDTFIVENNQISGWTRKAKETKVNEKTGRIQKKKRFGKSVANHAPAMFVTILENKVKSLGGEVVKVDTQNAASQYDFTNNSFEKHELKERSVTLSNGDIHQRDMLAAFNLQHLKYDESEKKQYDREAMAQHYERFCELEQEEIMRYKSKEKKDDRSTIGAEKL

SEQ ID NO: 3430 - protein, 524 aa, unidentified
  REGION 1..524: note = Description of Unknown: uncultivated organism sequence
  REGION 1..524: note = Category: MG91 effectors
  REGION 1..524: note = Description: MG91-622 effector
MYEVFVLELPLQVEKYQADILNKRYEQLRQLYNYVQGKLLRQYRYFEQMKEYQACKTIKEKRDFFKSHPFQVNESLCGDKSAFEISFNEFSIKGFIEKLVQKSVGANMTYADLGFTTNILDHLGASVWAAWDKKLYDFKAKRISFKKYGELDSFSSRRKVVGGKVYFSGMELHLDTMELAIKMNGKQGNNAKFITLKMQHNPKHAEYEMWALKGGVDSVKVVKVVRRLVRSQYKYYVQLTIEGEKPQKGRTLGMGNVGIDLGPTTVAVSGENVVSIDKLASKCDNIQEEITRLSRKIDRSRRANNPQNFNEDGTIKRGVKLIWNDSKRYKELRRELAELRRKQAAIRKQQHIDRANAILKEGDTFIVENNQISSWTTRAKETKVNEKTGKIQKKKRFGKSVANHAPSMFVSILENKVKSLGGEVVKVDTKNAASQYDFTDGSFTKHELKERNVTLSNGDTHQRDMLAAFNLQHLKYNEAEAKQYDTEAMAADYERFCQLEQEEIQRYKNKEKKDDKGTIGAEKL

SEQ ID NO: 3431 - protein, 530 aa, unidentified
  REGION 1..530: note = Description of Unknown: uncultivated organism sequence
  REGION 1..530: note = Category: MG91 effectors
  REGION 1..530: note = Description: MG91-623 effector
MPSQSFVIELPIAVDDAEMRTIVRKLEFARQLHNATLGTAMGQLQQMRQDAAWKEACVMPKGKERAAAFRALDHKYGLTEYDLHSVIARHREGSGRKAELGINETQKIATRVFQAINRYKLGLGGMPRFKSSKRGLHSIEGKTNKTGLKFRPEKKVLNWCGHDYRVLIDPKDDYIQRALKENERSDKYRKIKYCRLVRKRIRSSDRFFLQVVLEGTAPVKHVYAPVTERAAIDPGPQSIALFSKEFAGKIQVAGSNNFNEAASRRLLRAMDRSLRRNNPDAYNENGTIKKGAKLVKSKNYQRKVDRLREMHRVAAAERKCRHGQTINLLLSIAGDIRIEKNSWKAFQRGHFGKSLGKSAMSGFIAQLKSKAASAGLKVTEVNPYKLRLSQYDPYTDTYRKKDLSERWQEMKAGSGLYIQRDVLSALLLYCADIEKEIHIPKVAVEQLEGAKQFLTDAGYVVLKSTSSRDQRDPRLASEPKAMTPEMARQKILRGAGDSHLPTDQELGQIRAGGKVSTWSKETFPLQRGVV

SEQ ID NO: 3432 - protein, 525 aa, unidentified
  REGION 1..525: note = Description of Unknown: uncultivated organism sequence
  REGION 1..525: note = Category: MG91 effectors
  REGION 1..525: note = Description: MG91-624 effector
MEEVFVLELPLQVEKYQEDILNKRYEQLRQLYNYVQGKLLRQYRYFEQMKEYQTCKTFKEKRDFFRSHPFHINGVYGNNKELLDITFDEYGINGFVGKMGKKLVNADTTYADLGITSTLLDRLSLAIWAAWEKMLYDYHAKRISFKKYGELNIFGSRKKTNGSGKKMFSGMELHLETMTLSIKLNGKVGKNAKFITLPILHNPKHVDYEMMALKGGFDSVKVITVVRRMVRGRYKYYLQMSIEGEKPKKGRTLGKGNVGIDLGPTTIAVSSENIASIDKLVSKCDNIEVEKKRLGRKIDRSRRANNPENFNEDGTIKRGVRLTWNDSKRYKALRREMAELQRRQAAIRKQQHINRANALLKEGDTFIVENNQISGWTRKAKETKVNEKTGKIQKKKRFGKSVANHAPAMFVTILENKVKSLGGEVVKVDTQNAASQYDFTNNNFKKHELNERSVTLSNGDTHQRDMLAAFNLQHLKYDEAEKKQYDREAMSKHYERFCELEQAEIVRYKNKEKADDRSTIGAKEL

SEQ ID NO: 3433 - protein, 491 aa, unidentified
  REGION 1..491: note = Description of Unknown: uncultivated organism sequence
  REGION 1..491: note = Category: MG91 effectors
  REGION 1..491: note = Description: MG91-625 effector
MRATAEWQTARAMPKSSERTKAFRDLRVHFRLSEYDFHADVAKHRKASGRGHLLGINECQKLASRAWISVERHLYNGGSPRFISSRRGLHSIEGKTNRTGIIWKADQQCVTVCKRVYRVRVDKRDDWLTRALQDPTDPTKPRKVKYCRIVREMRKGKERFLLQLVAEGTSPLKHAYAGKDLRMAIDPGLGSLTYATEDGTIAKVQIAPSADTDHRAVRKLQRAMERSRQATNPDNYETVEVVRHGKKHKSLKVKSGRLQWRFSKRSENLRAELAEIFRLSAATRKREHGEICNWLLDHAGHIIVEDNSYKAFQKGHFGKSIRRHAPAAFYTQLTSKAESAGLQVTVVSPRKLKPSQHNLLTDTFVKHELWERRVRLGNDDDDRWIDRDAAACLNLLYADIDKQTYDPKRIREAVLAGVTAWLDAGVVVIQAREGITEREFGRFRRRGIPSLTVQGLRQQGFRGRSDSKSGTTPRRKASTVSKPSHFSGEVV

SEQ ID NO: 3434 - protein, 531 aa, unidentified
  REGION 1..531: note = Description of Unknown: uncultivated organism sequence
  REGION 1..531: note = Category: MG91 effectors
  REGION 1..531: note = Description: MG91-626 effector
MNEVFVLELPLQVEKYQADILNKRYEQLRQLYNYVQGKLLRQYRYFEQMKEFQDCKTFKAKREFIKAHPFQIKGVMGRNKELLDIFFDEYGILGLITKLGQKPIGSGKTYTDMGISSTILANLSNSIWSSWNKKLYDYHADRISFKKYGGLNTFGSGKIIQKKDNEVKEYFPGMVLHLDRMEIDIKTNGGLGKKATFITLPILHNPKHADYEMNALSGGSSSIKVLTIVRRMIRGQYKYYLQMSIEGEKPQKGRLLGKGNVGIDLGPTTVAVSGENIVSIDKLASKCDDIQEVITRLSRKIDRSRRANNPQNFNEDGTIKRGIKLVWNDSKRYKELRRELAELRRKQAAIRKQQHIDRANALLKEGDTFIVENNQISSWTTRAKETKVNEKTGKIQKKKRFGKSIANHAPSMFINILENKVKSLGGKVVKGDTKNAASQYDFTDGSFTKHELKERNVTLSNGDTHQRDMLAAFNLQHLKYNEAEAKQYDTEAMAADYERFCQLEQEEILRYKNKEKKDDRSTIGAEELLKT

SEQ ID NO: 3435 - protein, 410 aa, unidentified
  REGION 1..410: note = Description of Unknown: uncultivated organism sequence
  REGION 1..410: note = Category: MG91 effectors
  REGION 1..410: note = Description: MG91-627 effector
MRATAEWQTARAMPKNSERTKAFRDLRVRFRLSEYDFHADVAMHRKASGRGHLLGINECQKLASRAWISVERHLYNGDAPRFISSRRGLHSIEGKSNRTGIIWKADQQCVTVCKRVYRVRVDKRDDWLTRALQDPTDPKKPRKVKYCRIVREMRKGKERFFLQLVAEGTSPLKHAYAGKDLHMAIDPGLGSLTYATEDGTIAKVQIAPSADTDRRAIRRIQRAMERSRRTTNPDNYEAVDVVRHGKKKKSFKVKSGRLQWRFSKRYEKLRSELAEMLRLCTATRKREHGEVCNWLLGHAGHIIVEDNSYKAFQRGRFGKTIGRHAPAALYAQLTNKAESAGLLVEVVSPKKLKPTQHNLLTGQFVKHELWERRVRLGEDDDERWIDRDAAACLNLLYADIENQIRPGTDP

SEQ ID NO: 3436 - protein, 1347 aa, unidentified
  REGION 1..1347: note = Description of Unknown: uncultivated organism sequence
  REGION 1..1347: note = Category: MG91 effectors
  REGION 1..1347: note = Description: MG91-628 effector
MEEKEYYLGLDMGTNSVGWAVTDPQYTILRAKGKDMWGIREFESAETAEKRRGHRTSRRRRQREVVRMGLVKDYFSDAINNVDGNFYARLENSKYHLEDKDEAVRNKNGIFADEHYTDKEYYAEYPTIYHLIMELINNPAPHDVRLVYLAVANLFKRRGHFLNAGLSEDGGNQSMQTAYDGFNTTCNETLGFSFPGINATQIEEVLKNRNYSKTVKSEKLAELLGVEKKEKQRIEILRAIAGRKVNAKVIFPNVETEDKVEFSFSDAAFDDNATELMTLLGDECYSLVLCMREMYDIGTLAEIMHGCQYLSESRMADYQKHHEDLVLLKSVIKSECTQKQYDELFRLDGEGSYSAYVNSTLAKNHKQRRSMKGRTRDDFYKKVRGLIGKSSNPDAIKICTEIENETFMPKMLTSANGIIPNQVHYKELKAILSNAEKYLSFLLEKDESGLTTSDRIQRLYKFRIPYYVGPVSNRDGKGNGWAVRKEEGTVLPWNLEEKIDLSKTKEAFIENLIRRCTYISDEKVLPKNSLIYEKFTVLNEINNIRINDERISVDLKQDIYNELFKKGKKVTRKTLAKYLINRGVIEAENQISGIDIAINNSLSSYGKFKAVFGESMDTDTTKKMVEDIIKTSTIYGDDKRELKNILRDKYGEILSEDQIKRIAGFRFKDWGRLSRAFLELAGADCRTGEVTSIIQALWESQLNLMELLHSEDYTFGESLNEKLVKNEKSLSEITAEDLDDYYFSAPVKRMAWQTILLIKEISKIKGCEPSKIFIEMTRTDEEKGDKGRKNSRAKELTALYKNIKKEGKAWIELIGKEDASGRLKSKKMYLYIKQMGRDMYTGEQIDLDRLFDDNLYDIDHIYPRHFVKDNNIENNLVLVNKAKNSRKSDNYPLDSDIVRNPKVRELWEMLHTNHLMSDEKYHRLTSRKAFTDEDMAGFIARQLVETGQATKGVADLLKDLTNSEIIYSKAGNVSDFRHAYDIPKSRIVNEFHHAHDAYLNIVVGNAYYTKFTSNPLNYIRNEYKKNTKENNYHLNKIFESTISRNGYVAWLAGSDKNPGTIQTVKKMLSRNTPLMTRMTFVIHGSIAKETLCGKNIAKEDSYLPLKGSDPRMSVEKYGGFNKASGAYFFLVEHELKGKKVRTIETVPVYLMKKLSDERELQKYCEEKLGLINPSIRLKQIKMQSLIKLNGYFVNVTGRTNKQLTLRNAVNLKLDKEDIYIIHLVEKCIGEERDDRLSEESILSLYQTLTEKQASGIYRNRPNSVYEKLNEGMIRFKNLERKQQIKVLANILNLTMVGKAQADLKDIGGSANSGVMLMAKKINNYNEVKLINQSVTGLYQTEVDLLTV

SEQ ID NO: 3437 - protein, 525 aa, unidentified
  REGION 1..525: note = Description of Unknown: uncultivated organism sequence
  REGION 1..525: note = Category: MG91 effectors
  REGION 1..525: note = Description: MG91-629 effector
MEEVFVLELPLQVEKYQEDILNKRYEQLRQLYNYVQGKLLRQYRYFEQMKEYQTCKTFKEKRDFFRSHPFHINGVYGNNKELLDITFDEYGINGFVGKMGKKLVNAGTTYADLGITSTLLDRLSLAIWAAWEKMLYDYHAKRISFKKYGELNIFGSRKKTNGSGKKMFSGMELHLETMTLSIKLNGKVGKNAKFITLPILHNPKHVDYEMMALKGGFDSVKVITVVRRMVRGRYKYYLQMSIEGEKPKKGRTLGKGNVGIDLGPTTIAVSSENIASIDKLASKCDNIEVEKKRLGRKIDRSRRANNPGNFNEDGTIKRGVRLTWNDSKRYKALRREMAELQRRQAAIRKQQHINRANALLKEGDTFIVENNQISGWTRKAKETKVNEKTGRIQKKKRFGKSVANHAPAMFVTILENKVKSLGGEVVKVDTQNAASQYDFTNNSFEKHELKERSVTLSNGDIHQRDMLAAFNLQHLKFDESEKKQYDREAMAQHYERFCELEQEEIMRYKSKEKKDDRSTIGAEKL

SEQ ID NO: 3438 - protein, 522 aa, unidentified
  REGION 1..522: note = Description of Unknown: uncultivated organism sequence
  REGION 1..522: note = Category: MG91 effectors
  REGION 1..522: note = Description: MG91-630 effector
MDKEVFVIEFPLNVEKWQADILNKRYEHLRTLYNYVQGKLLRQYIYFAKMGEYKNCKTPKERREFFKTHAFHIKGISGRNKFSLDITFTEYGIHSLVTKLAQHRIGADCTYGDKGINSMILDHMAAYIWSSWNKKLYDINARRISFKNFGEINTFGVRKINGARFCGLNLHLDIMTLDIKVNGKNGQQAKFISLPIRYNLKHADYEMNALAGGFDSIKVLTVVRRMVRGRYKYYLQMTIEAVKPQKGRHLGNGRVGIDIGPTTIAVSSNSTVSIDKLAAKCDNIEQDIQRIGRKIDRSRRAMNPDNFNADGTVKRGVRLTWVKSERYKALCQEKAELQRKQAAIRKAQHIERANTLISEGDTFIIESNPIKGWTARAKETKVSEKTGRIQKKKRWGKSVANHAPSMFVTILENKVKSLGGTVIKADVKNAASQYDFTDGTFNKHELDERGVTLSNGDTHQRDMLSAFNLQHLIYDAKELKQYDQQQMEIHYPRFCELEQQEIEKYKQRIKTDDRSTIAASRL

SEQ ID NO: 3439 - protein, 530 aa, unidentified
  REGION 1..530: note = Description of Unknown: uncultivated organism sequence
  REGION 1..530: note = Category: MG91 effectors
  REGION 1..530: note = Description: MG91-631 effector
MRTSSIIVSYELTLPQRIYPHLDRLFSVFGRSVRDFIDRFWNESTLELLSQKGHVCSIIKEIVQKPQNLPSRVFRNALELSGQILRSQIERKKLFDTFMQYPCLVLYDEKEIAKSLNTSIWFALNVKRQVLKLLRKGERGDYFSLVKPSFSNSVVITSADDSLERGQFKKLRIEKNKLLFELKVPIGNTWKWVKVTKFIPDRLRKALRNAKEIKAPLIKRVTLKSGFTIYRLVIPVEVELRVKNRVERVFALDLSPSEKRLGVGVVVDKEGHSKPVLFTAYKMVRKLERLYGEISGLERKIDNIADDLHSTFKKGHKERLNQRLRHLYQEQKLRWRKFKELRKQILETFINLVIAHAKAYSCDAIAIEDLKFKDLPDWENKRFRRLFSTWFYSRLEERLRHKAQREGIKVLSVNPFNTSQVCHECGSKGKANRFEFVCESCGKRFDRDYNASVNIGIKALTLACKTKSKPYMGEDIPARVSSLQVLTRYKFKALLTLLSFLKLLAYLRLVETSYLKLKSLLKCISADKYG

SEQ ID NO: 3440 - protein, 525 aa, unidentified
  REGION 1..525: note = Description of Unknown: uncultivated organism sequence
  REGION 1..525: note = Category: MG91 effectors
  REGION 1..525: note = Description: MG91-632 effector
MNEVFVLELPLQVEKYQADVLNKRYEQLRQLYNYVQGKLLRQYRYFEQMKEYQACKTIKEKRDFFRSHPFQINETLKGNKIPFMVSFDEYSIKGFVEKLAQKPVGANMTFADLGFTTYILDHLGASIWAAWDKMLYDFKAKRISFKKYGELDSFSSRRKLVGGKVYFSGMEVHLDTMELAIKINGKQSNNAKFITLKILHNPKHADYELWALKGGVNSVKVVKVVRRLVRSQYKYYVQLTIEGEKPQKGRRLGKGNVGIDLGPTTVAVSGVNVVSIDKLASKCDDIQEEITRLSRRIDRSRRANNPQNFNEDGTIKRGIKLVWNDSNRYKELRRELAELRRKQAAIRKQQHIERANALLKEGDTFIVENNPISSWTTRAKETKVNEKTGKIQKKKRFGKSVANHAPSMFVSILENKVKSLGGDLVKVDTKNAASQYDFTNNSFTKHELKERNVTLSNGDTHQRDMLAAFNLQHLQYDEKDDKQYDTEAMTADYERFCQLEQEEILRYKNKVKKDDRGTIGAEKLY

SEQ ID NO: 3441 - protein, 530 aa, unidentified
  REGION 1..530: note = Description of Unknown: uncultivated organism sequence
  REGION 1..530: note = Category: MG91 effectors
  REGION 1..530: note = Description: MG91-633 effector
MTSQSFVIELPIAVDDAEMRTIVRKLEFARQLHNATLGTAMGQLQQMRQDAAWKEACVMPKGKERAAAFRALDRKYGLTEYDLHSVIAGHREGSGRKAELGINETQKIATRVFQAINRFKLGLGGMPRFKSSKRGLHSIEGKTNKTGLKFRPEKKVLNWCGHDYRVLIDPKDDYIQRALKENERSDKYRKIKYCRLVRKRIRSSDRFFLQVVLEGTAPVKHVYAPVTERAAIDPGPQSIALFSKEFAGKIQVAGSNNFNEAVSRRLLRAMDRSLRRNNPDAYNENGTIKKGAKLVKSKNYQRKVDRLREMHRVAAAERKCRHGQTINLLLSIAGDIRIEKNSWKAFQRGHFGKSLGKSAMSGFIAQLKSKAASAGLKVTEVNPYKLKLSQYDPYTDTYRKKDLSERWQEMKAGSGLYIQRDVLSALLLYCADIEKEIHIPKVAVEQLEGAKQFLTDAGYVVLKSTSSRDQRDPRLASEPKAMTPEMARQKILRGAGDSHLPTDQELGRIRAGGKVSTWSKETFPLQRGVV

SEQ ID NO: 3442 - protein, 385 aa, unidentified
  REGION 1..385: note = Description of Unknown: uncultivated organism sequence
  REGION 1..385: note = Category: MG91 effectors
  REGION 1..385: note = Description: MG91-634 effector
MAHKENQKAFVVTFPLRTEKWQEDRIDKMMRMLTTFYNDRQRKLVRRYIYLSHSKAYKEAKGKGVVAFKNYMKENGFSQYGLNAFFKADTKGALYQCGLNSMFLQYLSQCAWSAWDKKLFGKGDFVKTDKVVNIFCSRNKKERFCGFDYDLSTFTISIKSTYAKKIICTIPFVVNKKSDYELFALSQRICRIGIVRKLIRGKYKYYVQFTFDGVPYNKVRNIGTGIVGIDPGPSKIAIVGDNKVEIAKLAPNIEEDERKTARLKRKLDRSRRATNPHMYKEDGTTIKGQRQTCFSKVYNETRKQLADAQRKLAAKRKIAHNELANTLLEYGDTFKVEANSYKSMQARAKATSMTKSGRIRSKKRYGKSIKNRAPSEFLVILNNSL

SEQ ID NO: 3443 - protein, 537 aa, unidentified
  REGION 1..537: note = Description of Unknown: uncultivated organism sequence
  REGION 1..537: note = Category: MG91 effectors
  REGION 1..537: note = Description: MG91-635 effector
MSTKSFIINLPIITGDQDRRRLRKSFSFGCNLQNAVMGGGWDRVLKMRATPEWQTARAMPKSSERTKAFRDLRVRFRLSEYDFHADVAKHRKASGRGHLLGINECQKLASRAWISVERHLYNGGSPRFISSRRGLHSIEGKTNRTGIIWKADQQCVTVCKHVYRVRVDKRDDWLTRALQDPTDPTRPRKVKYCRIVREMRKGKERFLLQLVAEGTSPLKHAYAGKDLRMAIDPGLGSLTYATEDGTIAKVQIAPSADTDHRAVRKLQRAMERSRQATNPDSYETVEVVRHGKKHKSLKVKSGRLQWRFSKRSESLRAELAEIFRLSAATRKREHGEVCNWLLGHAGHIIVEDNSYKAFQRGRFGKTIGRHAPAALYAQLTNKAESAGLLVEVVSPKKLKPTQHNLLTGQFVKHELWERRVRMGNDDDDRWIDRDAAACLNLLYADLEKQTYAPERIREAVLAGVTAWLDAGVVVIQAREGITEREFGRFRRRGIPSLTVQGLRQQGFRGRSDSKSGATPRRKASTVSKPSHFSGEVV

SEQ ID NO: 3444 - protein, 528 aa, unidentified
  REGION 1..528: note = Description of Unknown: uncultivated organism sequence
  REGION 1..528: note = Category: MG91 effectors
  REGION 1..528: note = Description: MG91-636 effector
MNEVFVLELPLQVEKYQADVLNKRYEQLRQLYNYVQGKLLKQYRYFEQMKEYQACKTIKEKRDFFKNHPFQINEKQKSSEIPFNVYFDEYSLKGYIEKLVQKSVGPNMTYADLGFTTNILDHLGASVWAAWDKKLYDLKAKRISFKKYGELDSFSSRRKVVRGVVYFSGMELHLDSMELAIKMNGKVGKDAKFITLKMLHNPKHADYELWALKGGVDSVKVVKVVRRLVRSQYKYYVQLTIEGEKPQKGRTLGKGNVGIDLGPTTVAVSGVNVVSIDKLASKCDNIQEEITQLSRKIDRSRRANNPQNFNEDGTIKRGIKLVWSDSKRYKELRRELAELRRKQAVIRKQQHIERANALLKEGDTFIVENNPISSWTTRAKETKVNEKTGKIQKKKRFGKSVANHAPSMFVSILENKVKSLGGRFERVSTQNAASQYDFTTDTFKTGEEKHKLNERAITLSNGDTHQRDMLAAFNLQHLKYDEKDAKQYDTEAMTADYERFCQLEQEEILRYKNKVKKDDRSTIGAEKL

SEQ ID NO: 3445 - protein, 537 aa, unidentified
  REGION 1..537: note = Description of Unknown: uncultivated organism sequence
  REGION 1..537: note = Category: MG91 effectors
  REGION 1..537: note = Description: MG91-637 effector
MSTKSFIISLPIITGDQDRRRLRKSFSFGCNLQNAVMGGGWDCVLKMRATPEWQAARAMPKGSERTKAFRDLRVHFRLSEYDFHADVAKHRKASGRGHLLGINEGQKLASRAWISVERHLYNGGSPRFISSRRGLHSIEGKTNRTGIIWKADQQCVTVCKHVYRVRVDKRDDWLTRALQDPTDPTKPRKVKYCRIVREMRKGKERFLLQLVAEGTSPLKHAYAGKDLRMAIDPGLGSLTYATEDGTIAKVQIAPSADTDHRAVRKLQRAMERSRRATNPDNYEAVDVVRHGKKKKSFKVKSGRLQWRFSKRYESLRAELAEIFRLSAATRKREHGEVCNWLLGHAGHIIVEDNSYKAFQRGRFGKTIGRHAPAALYAQLTNKAESAGLLVEVVSPKKLKPTQHNLLTGQFVKHELWERRVRLGEDDDERWIDRDAAACLNLLYADLEKQTYAPERIREAVLAGVTAWLDAGVVVIQAREGITEREFGRFRRRGIPSLTVQGLRQQGFRGRSDSKSGTTPRRKASTESKPSHFSGEVV

SEQ ID NO: 3446 - protein, 484 aa, unidentified
  REGION 1..484: note = Description of Unknown: uncultivated organism sequence
  REGION 1..484: note = Category: MG91 effectors
  REGION 1..484: note = Description: MG91-638 effector
MAHKENQKAFVVTFPLRTEKWQEDRIDKMMRMLTTFYNDRQRKLVRRYIYLSHSKAYKEAKDKGVVVFKNYMKEHGFSQYGLDAFFKADTKGALYQCGLNSMFLQYLSQCAWSAWDKKLFGKGDFVKTDKVVNIFCSRNKKESFCGFDYDLSTFTISIKSTCTKKIICTIPFVVNKKSDYELFALSQRICRIGIVRKLIRGKYKYYVQFTFDGVPYHKGRNIGTGIVGIDPGPSKIAIVGDNKVEIAKLAPNIEEDERKTARLKRKLDRSRRATNPHMYKEDGTIIKGQRQTCFSKAYNETRKQLADAQRKLAAKRKIAHNELANTLLEYGDTFKVEANSYKSMQARAKATSMTKSGRIRSKKRYGKSIKNRAPSEFLVILKNKLLYYPKGKYYDVPSSYACTQFDFTNESFTEHKISERRIVTSDGIQHNRDTLAAFNIKNAIVNDTSTKKKKVTKSKEFLDIVKMKASYNEFCVMERYLLSV

SEQ ID NO: 3447 - protein, 609 aa, unidentified
  REGION 1..609: note = Description of Unknown: uncultivated organism sequence
  REGION 1..609: note = Category: MG91 effectors
  REGION 1..609: note = Description: MG91-639 effector
MSKENFVLTLPLKVEKWQADILDKRYELLRQVYNMVQQKLLRQYIYFSQQKAYKECGKDTKKKGKFFAEHPFFIKIDGKPCEVKFPTWKKSNQTASNSIAKYVSKLSSYKLGQDKTLSDFGINSYILEELGARIMKAWEDRLYKFKAKHISKREYGDVNSFSTRIKKSDNKISYPGFTINLEEGYITYNTNGRRGGFANLIKLPIDFSREKKGYAVEALKGGLESIREISVVRKYIRGKNKYYLQLTIDGEKPQKGRTLGRGNVGIDIGPSTIATSSLMGVHFDKLADKCDDIEHELYLVNRKLDRSRRATNPQNYNADGTFKTIKNRERRVWNYSNRYNKLKLVRKELFRRQAEIRKQQHLAMANALLSQGDTFIVENNPIDAWVRRAKETTKNKKGNYRCKKRYGKSVAHHAPAMFVSILENKVKSLGGELHKVDVGYAATQFDFTNGEFTKHAVNERSITLSNGHTHQRDMLSAFNLQHARLKTEGRNIEKTVDNYDIEQMNADYPIFCRLETAEQERFKAIRHYERDALFFVGVSNKHLRCQPQEETVANRHNGGVGRKDCNISLGSENAEITGNGLIRESIARVSQVPDECHPFAGKPIVLDGL

SEQ ID NO: 3448 - protein, 497 aa, unidentified
  REGION 1..497: note = Description of Unknown: uncultivated organism sequence
  REGION 1..497: note = Category: MG91 effectors
  REGION 1..497: note = Description: MG91-640 effector
MPSPTFIIELPIRVNDSESRTILRKLEFARQLHNATLGTALGQLQQLRQDSEWKRACLMPKGKERSELFRKLDRKYRLTEYDLHAVIAKHRQASGRKAELGINETQKIATRVFHAVNRYKLGLGGRPRFKSLSRGLRSIEGKSNKTGLKFNIEKSVLSWCKHDYRVFIDPQDDYLQRALRSEDRGGFKKVKYCRLVRKTIKGKNRFYLQVVLEGQAPIKHIYASTNERLSIDPGPQTIAVFSDVWAGKIKVSPNAQVDEKKIRRLQRSMDRSLRKSNPDCYENDGTLKKGCVLKKTKGCEKRIQRLQECHRKAVATRRCEHGQLINLLLSVAGDIRVEKNQWKAFQKGHFGKSLGKSGISGFIERLKSKAESAGLKVTEVKPYKLKLSQYDPYTDQYRKKSLNERWHSLGESSEWIQRDVMSALLLQCADLEEEKHIPTEVIKTLEGAKQLLRDAGYVILKPSSNGESNPAFASEPKAVTPEKVRLEIFCGASDSYL

SEQ ID NO: 3449 - protein, 491 aa, unidentified
  REGION 1..491: note = Description of Unknown: uncultivated organism sequence
  REGION 1..491: note = Category: MG91 effectors
  REGION 1..491: note = Description: MG91-641 effector
MRATPEWQAARAMPKGSERTKAFRDLRMRFRLSEYDFHADVAKHRKASGRGHLLGINECQKLASRAWISVERHLYNGGSPRFISSRRGLHSIEGKTNRTGIIWKADQQCVTVCKHVYRVRVDKRDDWLTRALQDPTDPKKPRKVKYCRIVREMRKGKERFLLQLVAEGTSPLKHAYAGKDLRMAIDPGLGSLTYATEDGTIAKVQIAPSADTDHRAIRRIQRAMERSRRATNPDNYETVEVVRHGKKHKSLKVKSGRLQWRFSKRYESLRAELAEIFRLSAATRKREHGEVCNWLLGHAGHIIVEDNSYKAFQRGRFGKTIGRHAPAALYAQLTNKAESAGLLVEVVSPKKLKPTQHNLLTGQFVKHELWERRVRLGEDDDERWIDRDAAACLNLLYADIENQTYAPERIREAVLAGVTAWLDAGVVVIQAREGITEREFGRFRRRGIPSLTVQGLRQQGFRGRSDSKSGATPRRKASTVSKPSHFSGEVV

SEQ ID NO: 3450 - protein, 588 aa, unidentified
  REGION 1..588: note = Description of Unknown: uncultivated organism sequence
  REGION 1..588: note = Category: MG91 effectors
  REGION 1..588: note = Description: MG91-642 effector
MVQRKLVRQYIYFAQQKEYKACENFQQRRDFFASHPFHFKGINSKNGEPADIKFPYTYESRSSNSGKRPSGGISDYVSKLWAHRVGADKTLANLGINSYILEELGLHIMKAWEKRLYDPRSSRVSFKDYGEVNSFGSRYKKDKQTGKVSFPGFTIYLEKDKNEVVKGGFITYNTNGKRSQPRPFVLPIDFSREKKDYAAYALKGGIDSLRKLIILRKNIRGRNKYYLQLTISGEKPQKGRTLGQGNVGIDIGPSTIATSSLQGVHFDKLADKCDNIEHELYLINRKMARSRYENNRQNYNADKTIKRGVRLVWKKDKDVKRYASLKLKRRELYRRQAEIRKLQHLEMANAMLSQGDTFIVENNPIDAWVRRAKETTKTKTGRNRCKKRYGKSVANHAPAMFVTILKNKVESLGGKFYEVDVRYAATQFDFTNGVKTKHEVSERSITLSNGRTHQRDMISAFNLQHIKLESIGTEVKEYDIEQMQADYPIFCRLEAAEQERFKMARHNERDALYFVGASEKQLRHQPQDESAANRHNGGVGRKHCNIRLGNENAEITGSGLVRESIERVSQVPDECHISGHQPIVLDGL

SEQ ID NO: 3451 - protein, 544 aa, unidentified
  REGION 1..544: note = Description of Unknown: uncultivated organism sequence
  REGION 1..544: note = Category: MG91 effectors
  REGION 1..544: note = Description: MG91-643 effector
MRVCCHHVVLITQKCRLLNKMNEVFVLELPLHVEKYQADILDKRYEQLRQLYNYVQGKLLRQYRYFEQMKEYQGCKTFKEKKDFFRSHPFKINETLKDSKTPFMVSFDEYSIKGFVEKLAQKSVGPNMAYSDLGFTTYILDHIGASIWAAWDKKLYDFKSNRISFKKHGELDSFSSRRKIVRGIVYFSGMELHLDTMELAIKINGKVGKEARFITLKMLHNPKHADYEMWALKGGVESVKVVKVVRRLVRSQYKYYVQLTIEGEKPQKGRTLGKGNVGIDLGPTTVTISGKNIVSIDKLASKCDNIQEEITRLSRKIDRTRRANNPQNFNEDGTVKRGIKLVWNDSKRYKELRRELTELRRKQAAIRKQQHIERANALLKEGDTFIVENNPVKAWSARKKETKIDEKTGKYKSKKGYGKSIGNHAPAMFIDILENKVKSLGGRLERVDTQNAASRFDFTDGSLTEHDRSERAITLSNGDTHQRDMLAAFNLQHLKLDEAKTKQYDTETMAADYKRFCQLEKEEIQRYKNKEKKDDRGTIGAGKL

SEQ ID NO: 3452 - protein, 525 aa, unidentified
  REGION 1..525: note = Description of Unknown: uncultivated organism sequence
  REGION 1..525: note = Category: MG91 effectors
  REGION 1..525: note = Description: MG91-644 effector
MNEVFVLELPLQVEKYQADLLNKRYEQLRQLYNYVQGKLLRQYRYFEQMKEYQACKTIKVKRDFFKNHPFQINETQKGSEIPFKVSFDEYSIKGYIEKLVQKPVGPNMTYADLGFTTNILDHLGASIWAAWDKKLYDFKAKRISFKKYGELDSFSSRRKVVRGVVYFSGMELHLDTMELAIKMNGKVGKEAKFITLKILHNPKHAEYEMWALKGGVDSVKVVKVVRRLVRSQYKYYVQLTIEGEKPQKGRTLGKGNVGIDLGPTTVAVSGMNIVSIDKLASKCDNIQPKITRLSRKLDRSRRANNPDNYNEDGTIKRGVKLVWKKEKDLKRYSKLKRELAELRRKQAAIRKQQHIDRANELLKEGDTFIVENNQISGWTTRAKETKVNEKTGKIQKKKRFGKSVANHAPSMFVSILENKVKSLGGEVMKVDTKNAASQYDFTDNSFTKHELKERNVTLSNGDTHQRDMLAAFNLQHLKLEGTKQYDTEAMAADYVRFCQLEQEEIQRYKNKEKKNDRGTIGAEKL

SEQ ID NO: 3453 - protein, 530 aa, unidentified
  REGION 1..530: note = Description of Unknown: uncultivated organism sequence
  REGION 1..530: note = Category: MG91 effectors
  REGION 1..530: note = Description: MG91-645 effector
MTSQSFVIELPIAVDDAEMRTIVRKLEFARQLHNATLGTAMGQLQQMRQDAAWKEACVMPKGKERAAAFRALDCKYGLTEYDLHSVIARHREGSGRKAELGINETQKIATRVFQAINRYKLGLGGMPRFKSSKRGLHSIEGKTNKTGLKFRPEKKVLNWCGHDYRVLIDPKDDYIQRALKENERSDKYRKIKYCRLVRKRIRSSDRFFLQVVLEGTAPVKHVYAPVTERAAIDPGPQSIALFSKEFAGKIQVAGSNNFNEAVSRRLLRAMDRSLRRNNPDAYNEDGTIKKGAKLVKSKNYQRKVDRLREMHRVAAAERKCRHGQTINLLLSIAGDIRIEKNSWKAFQRGHFGKSLGKSAMSGFIAQLKSKAASAGLKVTEVNPYKLRLSQYDPYTDTYRKKDLSERWQEMKAGSGLYIQRDILSALLLYCADIEKEIHIPKVAVEQLEGTKQFLTDAGYVVLKSTSSRDQRDPRLASEPKAMTPEMARQKILRGAGDSHLPTDQELGQIRAGGKVSTWSKETFPLQRGVV

SEQ ID NO: 3454 - protein, 539 aa, unidentified
  REGION 1..539: note = Description of Unknown: uncultivated organism sequence
  REGION 1..539: note = Category: MG91 effectors
  REGION 1..539: note = Description: MG91-646 effector
MNEVFVLELPLQVEKYQADILNKRYEQLRQLYNYVQGKLLRQYRYFEQMREFQTCKTFKEKKDFFRRHPFHIDGILGSNKELFDITFDEYGINGFVGKLGKKQVSAGVTYADLGITSTLLDRMSLAVWAAWDKMLYDYHARRVSFKKHGELNIFGSRKKTNGSGKKVFSGMELHLEKMEVAIKLNGKVGKAAKFITLPILHNPKHEDYEMWALKGGFDSVTVLTIVRRLVRGQYKYYVQLTIEGEKPQKGRTLGKGNVGIDLGPTTVAVSGENVVSIDKLASKCDNSQEEITRLSRKIDRSRRANNPQNFNEDGTIKRGVKLVWNDSKRYKELRRELAELRRKQAAIRKQQHIDRANALLKEGDTFIVENNPVKAWSAKKKETKIDEKTGRYKSKKGYGKSVGNHAPAMFVDILENKVKSLGGRFERVNTQNAASQYDFTTDSFKTGDEKHKLNERAITLSNGDTHQRDMLAAFNLQHLKLDEAKTKQYNTEAMKADYERFCEMEQEEIMRYKNLEKKDDRATIGAVDLWKESDEMKKE

SEQ ID NO: 3455 - protein, 530 aa, unidentified
  REGION 1..530: note = Description of Unknown: uncultivated organism sequence
  REGION 1..530: note = Category: MG91 effectors
  REGION 1..530: note = Description: MG91-647 effector
MNEVFVLELPLQVEKFQTDILNKRYEQLRQLYNYVQGKLLRQYRYFEQMKEYQACEKFREKKDFFKSHPFHINETLKGNKTPIKVSFDEYSIKGYIEKLAQKPVGPNMTYADIGFTTYILDHLGASIWSAWDKKLYDFKAKRISFKKYGELDSFSSRRKVVRGIVYFSGMELHLDTMELAIKLNGKVGKEAKFITLKILHNPKHADYEMWALKGGLESIKVVKVVRRMVRSQYKYYVQLTIEGEKPQKGRTLGKGRVGIDLGPTTVAISSENVVSIDKLASKCDNIQDEITKLSRKIDRSRRANNPQNFNEDGTIKRGIKLVWNDSKRYKELRRELAELRRKQAAIRKLQHIERANALLKEGDTFIVENNPVNAWVRRAKETKIDEKTGKYKSKRGSGRSVGNHAPAMFVDILENKVKSLGGRFERVTTQNAASQYDFTTDSFKTGDEKHKLNERAITLSNGDTHQRDMLAAFNLQHLKLDEAKTKQYDTEAMAADYERFCQLEQEEIMRYKNKEKKGDRGTIGAEYIHK

SEQ ID NO: 3456 - protein, 544 aa, unidentified
  REGION 1..544: note = Description of Unknown: uncultivated organism sequence
  REGION 1..544: note = Category: MG91 effectors
  REGION 1..544: note = Description: MG91-649 effector
MNLDSRVMNVSPRIVIRQSKVKEVFVLELPLRVEKYQADLLNKRFEQLRQLYNYVQGKLLRQYRYFEQMKEYQACKTFKEKKDFFRKHPFHINGILGSNKKPLNITFDEYGIRGFVEKLVQKGVGASMTYADLGFTTSILDHLSSGIWSAWDKMLYDYKARRISFRKYGELDSFSSRRKVVQGKIYFSGMELHLDSMMLSVKMNGKVGKAAKFITLPILHNPKHADYEMWALKGGLDSIKVVKVVRRMVRGRYKYYLQMSIESEKPLKGRKLGKGNVGIDLGPTTVAVSGENIASIDKLASKCDSIETEKAKLGRKIDRSRRANNPQNFNEDGTIKRGVRLVWNDSKRYKALRGEMAELQRRQSAIRKQQHIDRANELLKEGDIFIVENNQISGWTRKAKETRVDESTGRIRKKKRFGKSVANHAPSMFVNILENKVKSLGGQLVKVDTQNAASQYDFTDGSFTKHELQERNVTLSNGDTHQRDMLAAFNLQHLKYDEAEKKQYDREAMSKHYERFCELEQAEILRYKNKEKVDDRSTIGAKEL

SEQ ID NO: 3457 - protein, 507 aa, unidentified
  REGION 1..507: note = Description of Unknown: uncultivated organism sequence
  REGION 1..507: note = Category: MG91 effectors
  REGION 1..507: note = Description: MG91-650 effector
MKEQILSYELTLPQRIYPHLERLFSVFKNQVNSYIPKLWNEEGFKLLSQKSHAWGILKKEFPTPIGLPSRVFRNVLELTGQIIRSQIERKEVFEKLLRREELKGYDKRFVLNVQRQIENLRKKGKEVSCYFDLPYPEFDGNVVITSADDNFEKGQFRRLKISGNFLEFSIKVPTQKGWEWIKVKKLIPERLRKALMKAKEVKAVLIKKVLLKSGYNIYRLVIPLSFEVKEPEKVERVLALDLSPSEKRLGVAVLVEGEEVSKPLFFKTLMLRKVERLYFEVSNLERKIDNIYNSIEKTACKREKKRLWERLRHLFAEQKLKQRKIKQLRKQILETFTNLIVSHAKAYHCQAIVIEDLSFKEVPGWKNKPALRRFSQWFFSRFTSRLEEKAKFHNLKVMKVNPAYTSRVCHKCGKEGELEGLVFKCSCGTYDRDYNASVNIAFRLTKPKAQRAEGIPGRIPSRLVRVEWKALLSFISFSKLLAWLRIVETSQLKLKKLLKWIGSDKYD

SEQ ID NO: 3458 - protein, 531 aa, unidentified
  REGION 1..531: note = Description of Unknown: uncultivated organism sequence
  REGION 1..531: note = Category: MG91 effectors
  REGION 1..531: note = Description: MG91-651 effector
MNEVFVLELPLQVEKYQADILNKRYEQLRQLYNYVQGKLLRQYRYFEQMKEFQDCKTFKAKREFIKAHPFQIKGVMGRNKELLDIFFDEYGILGLITKLGQKPIGSGKTYTDMGISSTILANLSNSIWSSWNKKLYDYHADRISFKKYGGLNTFGSGKIIQKKDNEVKEYFPGMVLHLDRMEIDIKTNGGLGKKATFITLPILHNPKHADYEMNALSGGSSSIKVLTIVRRMIRGQYKYYLQMSIEGEKPQKGRLLGKGNVGIDLGPTTVAVSGENIVSIDKLASKCDDIQEVITRLSRKIDRSRRANNPQNFNEDGTIKRGIKLVWNDSKRYKELRRELAELRRKQAAIRKQQHIDRANALLKEGDTFIVENNQISSWTTRAKETKVNEKTGKIQKKKRFGKSVANHAPSMFVSILENKVKSLGGKVVKVDTKNAASQYDFTDGSFTKHELKERNVTLSNGDTHQRDMLAAFNLQHLKYNEAEAKQYDTEAMAADYERFCQLEQEEILRYKNKEKKDDRSTIGAEELLKT

SEQ ID NO: 3459 - protein, 525 aa, unidentified
  REGION 1..525: note = Description of Unknown: uncultivated organism sequence
  REGION 1..525: note = Category: MG91 effectors
  REGION 1..525: note = Description: MG91-652 effector
MTSQSFVIELPIAVDDAEMRTIVRKLEFARQLHNATLGTAMGQLQQMRQDAAWKEACVMPKGKERAAAFRALDRKYGLTEYDLHSVIARHREGSGRKAELGINETQKIATRVFQAINRYKLGLGGMPRFKSSKRGLHSIEGKTNKTGLKFRPEKKVLNWCGHDYRVLIDPKDDYVQRALKENERSDQYRKIKYCRLVRKRIRSADRFFLQVVLEGTAPVKHVYAPVTERAAIDPGPQSIALFSKAFAGKIQVAGSNNFNEAASRRLLRAMDRSLRRNNPDAYNEDGTIKKGAKLVKSKNYQRKVDRLREMHRVVAAERKCRHGQTINLLLSIAGDIRIEKNSWKAFQRGHFGKSLGKSAMSGFIAQLKSKAASAGLKVTEVNPYKLKLSQYDPYTDTYRKKDLSERWQEMKAGSGQYIQRDILSALLLYCADIEKEIHIPKAAVEQLEGAKQFLTDAGYVVLKSTSSRDQRDLRLAPEPKAMTPEMARQKILRGAGDSHLPTDQALGRIRAGGKVSTWSKETFPL

SEQ ID NO: 3460 - protein, 510 aa, unidentified
  REGION 1..510: note = Description of Unknown: uncultivated organism sequence
  REGION 1..510: note = Category: MG91 effectors
  REGION 1..510: note = Description: MG91-653 effector
MKEQILSYELTLPQRIYPHLDRLFSVFRSQVNSYIQELWNEKGFELLSQKGSAVGILKEVFPTPECVPSRVFRNILELTGQIIRGQIERKEVFEKLLKEEKVKGYSKNLVLNVQRQIENLRRKGKEVSCYFDLPHPEFDGRIVITSADDNLEKGQFRRVKVDRNFLTFEIKVPMQDGWEWIKVRKFLPGRLRKALLRAKEIQVPLIKRQRLKSGYTIYRLVIPLVFKVKEPEKVERVFAIDLSPGERRLGVGIVMDDEFVSKPIFFKTNLIKKVERIHKEISNLERKIDNIHNAIEDANSKRVKETLFKRLNHLFGEQKRKQRKIKELRKQILETFTNLAIAYAKAYHCQAVAIEKLVFKEVPSWQSSKALRLFTQWFYSKFAKRLEEKARVNELKVIKVNPAYTSKACAKCGREGEFEGLKFICFCGVYDRDYNASLSIAKRALRPTKPEAQGAEGIPGRIPSRLVRMEGSALLTMISLFKLLAWLKVVHTCCLKPQKLFKWIRSDKYG

SEQ ID NO: 3461 - protein, 537 aa, unidentified
  REGION 1..537: note = Description of Unknown: uncultivated organism sequence
  REGION 1..537: note = Category: MG91 effectors
  REGION 1..537: note = Description: MG91-654 effector
MSTKSFTINLPIITGDQDRRRLRKSFSFGCNLQNAVMGGGWDRVLKMRATAEWQTARAMPKSSERTKAFRDLRVRFRLSEYDFHADVAKHRKASGRGHLLGINECQKLASRAWISVERHLYNGGSPRFISSRRGLHSIEGKTNRTGIIWKADQQCVTVCKHVYRVRVDKSDDWLTRALQDPTDPTKPRKVKYCRIVREMRKGKERFLLQLVAEGTSPLKHAYAGKDLRMAIDPGLGSLTYATEDGTIAKVQIAPSADTDHRAIRRIQRAMERSRRATNPDNYEAVDVVRHGKKHKSLKVKSGRLQWRFSKRYESLRAELAEIFRLSAATRKREHGEVCNWLLGHAGHIIVEDNSYKAFQRGRFGKTIGRHAPVALYAQLASKAESAGLLVEVVSPKKVKPTQHNLLTDTFVKHELWERRVRLGNDDDDRWIDRDAAACLNLLYADLEKQTYAPERIREAVLAGVTAWLDAGVVVIQAREGITEREFGRFRRRGIPSLTVQGLRQQGFRGRSDSKSGTTPRRKASTVSKPSNFRGEVV

SEQ ID NO: 3462 - protein, 511 aa, unidentified
  REGION 1..511: note = Description of Unknown: uncultivated organism sequence
  REGION 1..511: note = Category: MG91 effectors
  REGION 1..511: note = Description: MG91-655 effector
MGGMRAIRIAVMTSQSFIVELPIVVDDSERRTIVQKLEYARQLHNATLGTALGQLQQMRQDTAWRQARSMPQGKERTEIFRALDRQYKLTEYDLHAVIARHREESGRKAELGINETQKIATRVYQSVNRYKLGLGGCPRFKSFKRGLHSIEGKTNKTGLKFKPEQSVLSWCGHDYRVLIDPKDDYLQRALKADGQGTGYRKIKYCRLVRRRIRSKEYFYLQVVLEGTAPVKHIYASTNERLAIDPGPQTIAVFSNMFIGKIRVAGNYQLQDAQIRRLQRSMDRSLRANNKDANEENGTLKKGAKLVQTKGYLTRAARLRELHRKAAMHRKCQHGQTVNLLLSIAGDIRIEKNNWKAFQRGHFGKSLGKSAMSGFFNQLRTKAESAGLKVTEVNPYKLKLSQYDPYTETYRKKDLKERWQEMQPGSGQYIQRDVLSALLLLCADLEEEKHIPKAALDRLEGAKQLLKGAGYVIDKPTSNPDQPDPRFAPEPKALTPERARLEILCGTGDSCL

SEQ ID NO: 3463 - protein, 525 aa, unidentified
  REGION 1..525: note = Description of Unknown: uncultivated organism sequence
  REGION 1..525: note = Category: MG91 effectors
  REGION 1..525: note = Description: MG91-656 effector
MEEVFVLELPLQVEKYQEDILNKRYEQLRQLYNYIQGKLLRQYRYFEQMKEFQVCKTFKEKRDFFRNHPFHINGVYGNNKELLDITFDEYGINGFVGKMGKKLVNADTTYADLGITSTLLDRLSLAIWAAWEKMLYDYHAKRISFKKYGELNIFGSRKKTNGSGKKMFSGMELHLETMTLAVKLNGKVGKKAKFITLPILHNPKHVDYEMMALKGGFDSVKVITVVRRMVRERYKYYLQMSIEGEKPQKGRTLGKGNVGIDLGPTTVAVSGENIVSIDKLASKCDNIQAEITRLARKIDRSRRANNPQNFNEDGTIKRGVRLTWNDSKRYKALRREMAELQRRQAAIRKQQHINRANALLKEGDTFIVENNQISGWTRKAKETKVNEKTGKIQKKKRFGKSVANHAPAMFVTILENKVKSLGGEVVKVDTQNAASQYDFTNNNFKKHELNERSVTLSNGDTHQRDMLAAFNLQHLKYDEAEKKQYDREAMSKHYERFCELEQAEIVRYKNKEKADDRSTIGAKEL

SEQ ID NO: 3464 - protein, 612 aa, unidentified
  REGION 1..612: note = Description of Unknown: uncultivated organism sequence
  REGION 1..612: note = Category: MG91 effectors
  REGION 1..612: note = Description: MG91-657 effector
MAKETFVLTLPLKVEKWQADILDKRYELLRQTYNMVHRKLLCQYIYFSQQKAYKACENFQQRREFFESHPFHFKGINGKNGEPSDIKFPYTYESRSSNSGKRPSGGISDYVSKLWSHRVGQDKTLADFGLNGSILEELGLHVMSAWGKRLYDPKASRVSFKEYGDINSFGCRYHKGNFAGFTINLEEGYITYNTNCRRGRFADIIQLPIDFSREKKDYAVYALRGGIDSLRKLIILRKNIRGRNKYYLQLTINGEKPQKGRTLGRGNVGIDIGPSTIATSSLQGVHFDKLADKCDNIEHELYLIGRKMDRSRRANNPQNYNPDGTIKRGVRLTWKKDSEAKRYASLKQKRRELYRRQAEIRKLQHLEMANAMLSQGDTFIVENNPIDAWVRRAKETTKTKTGRNRCKKRYGKSVANHAPAMFVSILKNKVLSLGGAFHEVDVRYAATQFDFTNGVKTKHEVGERRITLSNGRTHQRDMISAFNLQHIKLESIGTEVKEYDIEQMQADYPIFCQLEAAEQERFKEARHAERDALYFIGAQEKQLRHQPQDESVANRHNGGVGRKHCNTRLGSRSKENAKITGSGLVRESIARVSQVPDECHPVGDHPIILDGL

SEQ ID NO: 3465 - protein, 607 aa, unidentified
  REGION 1..607: note = Description of Unknown: uncultivated organism sequence
  REGION 1..607: note = Category: MG91 effectors
  REGION 1..607: note = Description: MG91-658 effector
MAKEEFVLTLPLKVEKWQADILDKRYEMLRQVYNMVQQKLVRQYIYFSQQKAYRDCKNFEQRREFFENHPFHIKGVKGKNGELCDIKFPYTFKSRGGPSGKRAPNGISDYVSKLWSHKIGQNKTLSDYGINSYIMEELGLHIMKAWEDRLYKPKSKRVSFKDYGEINSFGSRKKNGIFVGFTINLDNGIITYKTNGRLGQFADLIQLPIDFCREKSGYAKEALKGGIESLKKLLIVRRYIRGGNKYYLQLTISGEKPQKGRTLGKGNVGIDIGPSTIATSSLKGVHFDKLANKCDNIEHELYLINRKLDRSRRANNPQNYNEDGTIKRGIRLVWKKDKDVKRYATLKQQRKELYRKQAEIRKHQHLEMANAMLSQGDTFIVENNPVDAWVRRAKETTKTKAGKNRCKKRYGRSVANHAPAMFVSILKNKVLSLGGNFYEIDPRNAATQFDFTNGKFTKHEVRERSITLSNGCTHQRDMLSAFNLQHIVLQSKELKEYDIEQMKADYPIFCRLESAEQERFRIARHNERDALYFVGASEKQMRRQPQEKTVANHHNGGVDRKYCNTSLESENVKITGSGLVRESIERVSQVPDECHLFGCDPIVLDGL

SEQ ID NO: 3466 - protein, 524 aa, unidentified
  REGION 1..524: note = Description of Unknown: uncultivated organism sequence
  REGION 1..524: note = Category: MG91 effectors
  REGION 1..524: note = Description: MG91-659 effector
MKEVFVLDLPLRVEKYQSDILNKRFEQLRQLYNYVQGKLLRQYRYFEQMKEYQACKTFKEKKDFFRNHPFHINGILGSNKELLDITFDEYGIKGFVEKLVQKGVGTDMTYADLGFTTYILDHLSAGIWSAWDKMLYDYKARRISFKKYGELDSFSSRRKVVQGKVYFSGMELHLDSMMLSVKMNGKVGKAAKFITLPILHNPKHADYEMWALKGGLDSIKVVKVVRRMVRGRYKYYLQMSIESEKPLKGRKLGKGNVGIDLGPTTVAVSGENIASIDKLASKCDSIETEKAKLGRKIDRSRRANNPQNFNEDGTIKRGVRLVWNDSKRYKALRGEMAELQRRQSAIRKQQHIDRANELLKEGDIFIVENNQISGWTRKAKETRVDESTGRIRKKKRFGKSVANHAPSMFVNILENKVKSLGGQLVKVDTQNAASQYDFTDGSFTKHELQERNVTLSNGDTHQRDMLAAFNLQHLKYDEAEKKQYDREAMSKHYERFCELEQAEILRYKNKEKVDDRSTIGAKEL

SEQ ID NO: 3467 - protein, 529 aa, unidentified
  REGION 1..529: note = Description of Unknown: uncultivated organism sequence
  REGION 1..529: note = Category: MG91 effectors
  REGION 1..529: note = Description: MG91-660 effector
MKEVFVLELPLQVEKYQADILNKRYEQLRQLYNYVQGKLLRQYRYFEQMKDYQACKAFKEKREFFKTHPFHINGVLGRNKELLDITFNEYGILGWVTKLGQMSIGSGKTYADIGITARILANLSDNIWSAWNKKLYDYRSERISFKKYGSLNTFGSGKTILKKGKEIKEYFSGMVLHLERMEIDIKTNGSNGKNATFISLPILHNPKHADYEMMALSGGSSSIKVLTIVRRLVRGQYKYYLQLSIEGEKPQKGRTLGKGNVGIDLGPTTIAVSGENVVSIDKLASKCDNIQTEITKLARKIDRSRRANNPQNFNEDGTIKRGIKLVWNDSKRYKELRRELAELCRKQAAIRKQQHIDRANALLKEGDTFIVENNPVKAWAARAKETKVNEKTGKIQSKKRGGKSIGNHAPAMFVDILENKVKSLGGTFIRANTNNAASQYDFSNNSFKEGEDRHGLNERAITLSNGNTHQRDMLAAFNLQHLTDEKKQYDVEAMKRDYERFCQLEQEEIQRYKNKEKKDDRGTIGAEKL

SEQ ID NO: 3468 - protein, 472 aa, unidentified
  REGION 1..472: note = Description of Unknown: uncultivated organism sequence
  REGION 1..472: note = Category: MG91 effectors
  REGION 1..472: note = Description: MG91-662 effector
MPKGKERAAAFRALDRKYGLTEYDLHSVIARHREGTGRKAELGINETQKIATRVFQAINRYKLGLGGMPRFKSFKRGLHSIEGKTNKTGLKFKPEQKVLNWCGHDYRVLIDPKDDYIQRALKDNERSDQYRKIKYCRLVRRRIRSADRFFLQVVLEGTAPVKHVYAPVTERAAIDPGPQSIALFSKAFAGKIQVAGSNNFNEAASRRLLRAMDRSLRRNNPDAYNEDGTINKGVKLAKSKNYQRKVDRLHEMHRVAAAQRKCRHGQTINLLLSIAGDIRIEKNSWKAFQRGHFGKSLGKSAMSGFIAQLKSKAESAGLKVTEVNPYKLKLSQYDPYTDTYRKKDLSERWQEMKAGSGQYIQRDVLSALLLYCADIEKEIHIPKAAVEQLEGAKQLLTDAGYVVLKSTSSRDQRDPRLASEPKAMTPEMARQKILRGAGDSHLPTDQALGRIRAGEKVSTWSKETFPLQRGVV

SEQ ID NO: 3469 - protein, 525 aa, unidentified
  REGION 1..525: note = Description of Unknown: uncultivated organism sequence
  REGION 1..525: note = Category: MG91 effectors
  REGION 1..525: note = Description: MG91-663 effector
MTSQSFVIELPIALDDAEMRTIVRKLEFARQLHNATLGTAMGQLQQMRQDAAWKEACVMPKGKERAAAFRALDRKYGLTEYDLHSVIARHREGTGRKAELGINETQKIATRVFQAINRYKLGLGGMPRFKSSKRGLHSIEGKTNKTGLKFRPEKKVLNWCGHDYRVLIDPKDDYVQRALKENERSDQYRKIKYCRLVRKRIRSADRFFLQVVLEGTAPVKHVYAPVTERAAIDPGPQSIALFSKAFAGKIQVAGSNNFNEAASRRLLRAMDRSLRRSNPDAYNEDGTIKKGAKLVKSKNYQRKVDRLREMHRVAAAERKCRHGQTINLLLSIAGDIRIEKNSWKAFQRGHFGKSLGKSAMSGFIAQLKSKAASAGLKVKEVNHYKLKLSQYDPYTDTYRKKDLSERWQEMKAGSGQYIQRDILSALLLYCADIEKEIHIPKVAVEQLEGAKQFLTDAGYVVLKSTSSRDQRDLRLAPEPKAMTPEMARQKILRGAGDSHLPTDQALGRIRAGGKVSTWSKETFPL

SEQ ID NO: 3470 - protein, 1128 aa, unidentified
  REGION 1..1128: note = Description of Unknown: uncultivated organism sequence
  REGION 1..1128: note = Category: MG91 effectors
  REGION 1..1128: note = Description: MG91-664 effector
MNKKILSLDLGITSIGYSVIEEFDNDRYSLLDYGVSMFDKATDKDGNSKKILHSQSESSSKLFNLRKQRKKDLSILFDNFKLANKDKLLIQEKQNIYKNKWQLRCVKAFEQKLSINELFTIFYTIAKHRGYKSLESSDLLDELCEELNIPLEITKSNKNEDEKGKIKKSLKNVEELKQNSNKTVASIIYDIEIQKNNPTFRNHDNYNYMIRREYIEEEIINIVKSQVKFGLFESSFNSDIFIQKLKDIITYQNPSTNDMSLFGDCEFYPQFKVANQYSIISDIYKMYQSVSNITFNSKPTIKITKEQINLVANDFFTKLKKGKNILDLKYKDIRKILNLSDDIKIFNKDDDYISKGKKVHHTITKFHFINNLSKFDTNFIINNLSNENGYKNLKEIFEALQFEKDPTEIYKKLKDKIEDNQTIIYLIKYKSGNSLNISAEAMIKFIPYFKDGYTTDEIKEKLKLNRSEDYSEFKKGIKYLHINQFEKDNNNLKITNHPVKYVVSATLRVVKHLHNVYGSFDEIRVESTRELSQNEETKKAIEKANRELEKQIDTIVQNNEYQIIAKQYGKNLQKYARKILMYESQDRRDIYTGKGIEFKDIFTNTVDLDHIVPQSLGGLSVKHNFVLVHKDTNIQKSNQLPLNFVKDKEDFINRVEYLFAEHKINWKMKKNLLSNSLEETYKDTFESKSLRATSYIEALTAQVLKRYYPFKDIKKQKDGSSVRHIQGRATSNIRKILKVKTKIRDTNIHHAIDAILIGMTNQSWLKKLSDTFKNNMGVIDDKARANIKKDIPIFEIIINNEVKYLEPKELVNLIEDNYNFDGENSIFYKDIWGKTKSINFWVSKKPMVSKIHKDTIYSKKDNGIYTVRESIINHFINLKITPTTLSKKFEEEFNKKILNKMYLYKTNPNDIIYKIVQQRANDIKVLLDSFMLEDTKDKETLSILKTNLDNLIHSDLLDNNNNIIKKVKFYQTNLTGFNVRGGLATKEKTFIGFKATLENDKLNYTRIDVANIDKIKKDNDNSFKVYKNDLVFFVYPDKSYKGGKIVSFLEDKKIGAFQNPRFPATIQFQPFNFCKLGSGKKVGTKQQALAQTIGIIKLNLDILGNIKSYQKIGQCNSDILEHIKTIKG

SEQ ID NO: 3471 - RNA, 43 nt, synthetic construct
  misc_feature 1..43: note = Description of Artificial Sequence: Synthetic oligonucleotide
  misc_feature 1..43: note = Category: MG11 effectors crRNA
  misc_feature 1..43: note = Description: MG11-1 effector crRNA
  misc_difference 20..43: note = modified_base - a, c, u, g, unknown or other
  source 1..43: mol_type = other RNA
gaatacctgctaatgcaggnnnnnnnnnnnnnnnnnnnnnnnn

SEQ ID NO: 3472 - DNA, 31 bp, unidentified
  misc_feature 1..31: note = Description of Unknown: uncultivated organism sequence
  misc_feature 1..31: note = Category: MG11 effectors repeat
  misc_feature 1..31: note = Description: MG11-1 effector repeat
  source 1..31: mol_type = unassigned DNA
gtaacattacacgaatacctgctaatgcagg

SEQ ID NO: 3473 - DNA, 31 bp, unidentified; identical to SEQ ID NO: 3472
  misc_feature 1..31: note = Description of Unknown: uncultivated organism sequence
  misc_feature 1..31: note = Category: MG11 effectors repeat
  misc_feature 1..31: note = Description: MG11-1 effector repeat
  source 1..31: mol_type = unassigned DNA

SEQ ID NO: 3474 - DNA, 31 bp, unidentified; identical to SEQ ID NO: 3472
  misc_feature 1..31: note = Description of Unknown: uncultivated organism sequence
  misc_feature 1..31: note = Category: MG11 effectors repeat
  misc_feature 1..31: note = Description: MG11-1 effector repeat
  source 1..31: mol_type = unassigned DNA

SEQ ID NO: 3475 - DNA, 25 bp, unidentified
  misc_feature 1..25: note = Description of Unknown: uncultivated organism sequence
  misc_feature 1..25: note = Category: MG11 effectors repeat
  misc_feature 1..25: note = Description: MG11-2 effector repeat
  source 1..25: mol_type = unassigned DNA
aaaatagaatttctacttgtgtaga

SEQ ID NO: 3476 - DNA, 25 bp, unidentified
  misc_feature 1..25: note = Description of Unknown: uncultivated organism sequence
  misc_feature 1..25: note = Category: MG11 effectors repeat
  misc_feature 1..25: note = Description: MG11-2 effector repeat
  source 1..25: mol_type = unassigned DNA
aaaatagaatttctacttgtgtaga

SEQ ID NO: 3477 - DNA, 25 bp, unidentified
  misc_feature 1..25: note = Description of Unknown: uncultivated organism sequence
  misc_feature 1..25: note = Category: MG11 effectors repeat
  misc_feature 1..25: note = Description: MG11-2 effector repeat
  source 1..25: mol_type = unassigned DNA
aaaatagaatttctacttgtgtaga

SEQ ID NO: 3478 - DNA, 25 bp, unidentified
  misc_feature 1..25: note = Description of Unknown: uncultivated organism sequence
  misc_feature 1..25: note = Category: MG11 effectors repeat
  misc_feature 1..25: note = Description: MG11-2 effector repeat
  source 1..25: mol_type = unassigned DNA
aaaatagaatttctacttgtgtaga

SEQ ID NO: 3479 - DNA, 25 bp, unidentified
  misc_feature 1..25: note = Description of Unknown: uncultivated organism sequence
  misc_feature 1..25: note = Category: MG11 effectors repeat
  misc_feature 1..25: note = Description: MG11-2 effector repeat
  source 1..25: mol_type = unassigned DNA
aaaatagaatttctacttgtgtaga

SEQ ID NO: 3480 - DNA, 25 bp, unidentified
  misc_feature 1..25: note = Description of Unknown: uncultivated organism sequence
  misc_feature 1..25: note = Category: MG11 effectors repeat
  misc_feature 1..25: note = Description: MG11-2 effector repeat
  source 1..25: mol_type = unassigned DNA
aaaatagaatttctacttgtgtaga

SEQ ID NO: 3481 - DNA, 25 bp, unidentified
  misc_feature 1..25: note = Description of Unknown: uncultivated organism sequence
  misc_feature 1..25: note = Category: MG11 effectors repeat
  misc_feature 1..25: note = Description: MG11-2 effector repeat
  source 1..25: mol_type = unassigned DNA
aaaatagaatttctacttgtgtaga

SEQ ID NO: 3482 - DNA, 25 bp, unidentified
  misc_feature 1..25: note = Description of Unknown: uncultivated organism sequence
  misc_feature 1..25: note = Category: MG11 effectors repeat
  misc_feature 1..25: note = Description: MG11-2 effector repeat
  source 1..25: mol_type = unassigned DNA
aaaatagaatttctacttgtgtaga

SEQ ID NO: 3483 - DNA, 25 bp, unidentified
  misc_feature 1..25: note = Description of Unknown: uncultivated organism sequence
  misc_feature 1..25: note = Category: MG11 effectors repeat
  misc_feature 1..25: note = Description: MG11-2 effector repeat
  source 1..25: mol_type = unassigned DNA
aaaatagaatttctacttgtgtaga

SEQ ID NO: 3484 - DNA, 25 bp, unidentified
  misc_feature 1..25: note = Description of Unknown: uncultivated organism sequence
  misc_feature 1..25: note = Category: MG11 effectors repeat
  misc_feature 1..25: note = Description: MG11-2 effector repeat
  source 1..25: mol_type = unassigned DNA
aaaatagaatttctacttgtgtaga

SEQ ID NO: 3485 - DNA, 25 bp, unidentified
  misc_feature 1..25: note = Description of Unknown: uncultivated organism sequence
  misc_feature 1..25: note = Category: MG11 effectors repeat
  misc_feature 1..25: note = Description: MG11-2 effector repeat
  source 1..25: mol_type = unassigned DNA
aaaatagaatttctacttgtgtaga

SEQ ID NO: 3486 - DNA, 25 bp, unidentified
  misc_feature 1..25: note = Description of Unknown: uncultivated organism sequence
  misc_feature 1..25: note = Category: MG11 effectors repeat
  misc_feature 1..25: note = Description: MG11-2 effector repeat
  source 1..25: mol_type = unassigned DNA
aaaatagaatttctacttgtgtaga

SEQ ID NO: 3487 - DNA, 37 bp, unidentified
  misc_feature 1..37: note = Description of Unknown: uncultivated organism sequence
  misc_feature 1..37: note = Category: MG11 effectors repeat
  misc_feature 1..37: note = Description: MG11-3 effector repeat
  source 1..37: mol_type = unassigned DNA
ggctataaggccatattaatttctactattcgtagat

SEQ ID NO: 3488 - DNA, 37 bp, unidentified; identical to SEQ ID NO: 3487
  misc_feature 1..37: note = Description of Unknown: uncultivated organism sequence
  misc_feature 1..37: note = Category: MG11 effectors repeat
  misc_feature 1..37: note = Description: MG11-3 effector repeat
  source 1..37: mol_type = unassigned DNA

SEQ ID NO: 3489 - DNA, 37 bp, unidentified; identical to SEQ ID NO: 3487
  misc_feature 1..37: note = Description of Unknown: uncultivated organism sequence
  misc_feature 1..37: note = Category: MG11 effectors repeat
  misc_feature 1..37: note = Description: MG11-3 effector repeat
  source 1..37: mol_type = unassigned DNA

SEQ ID NO: 3490 - DNA, 37 bp, unidentified; identical to SEQ ID NO: 3487
  misc_feature 1..37: note = Description of Unknown: uncultivated organism sequence
  misc_feature 1..37: note = Category: MG11 effectors repeat
  misc_feature 1..37: note = Description: MG11-3 effector repeat
  source 1..37: mol_type = unassigned DNA

SEQ ID NO: 3491 - DNA, 36 bp, unidentified
  misc_feature 1..36: note = Description of Unknown: uncultivated organism sequence
  misc_feature 1..36: note = Category: MG11 effectors repeat
  misc_feature 1..36: note = Description: MG11-5 effector repeat
  source 1..36: mol_type = unassigned DNA
ggtgtaaaaccatatcaaatttctactaatgtagat

SEQ ID NO: 3492 - DNA, 36 bp, unidentified; identical to SEQ ID NO: 3491
  misc_feature 1..36: note = Description of Unknown: uncultivated organism sequence
  misc_feature 1..36: note = Category: MG11 effectors repeat
  misc_feature 1..36: note = Description: MG11-5 effector repeat
  source 1..36: mol_type = unassigned DNA

SEQ ID NO: 3493 - DNA, 36 bp, unidentified; identical to SEQ ID NO: 3491
  misc_feature 1..36: note = Description of Unknown: uncultivated organism sequence
  misc_feature 1..36: note = Category: MG11 effectors repeat
  misc_feature 1..36: note = Description: MG11-5 effector repeat
  source 1..36: mol_type = unassigned DNA

SEQ ID NO: 3494 - DNA, 36 bp, unidentified
  misc_feature 1..36: note = Description of Unknown: uncultivated organism sequence
  misc_feature 1..36: note = Category: MG11 effectors repeat
  misc_feature 1..36: note = Description: MG11-6 effector repeat
  source 1..36: mol_type = unassigned DNA
ggtgtaagaccactgaaaatttctacttgtgtagat

SEQ ID NO: 3495 - DNA, 36 bp, unidentified
  misc_feature 1..36: note = Description of Unknown: uncultivated organism sequence
  misc_feature 1..36: note = Category: MG11 effectors repeat
  misc_feature 1..36: note = Description: MG11-7 effector repeat
  source 1..36: mol_type = unassigned DNA
ggctataaagccattttaatttctactattgtagat

SEQ ID NO: 3496 - DNA, 36 bp, unidentified; identical to SEQ ID NO: 3495
  misc_feature 1..36: note = Description of Unknown: uncultivated organism sequence
  misc_feature 1..36: note = Category: MG11 effectors repeat
  misc_feature 1..36: note = Description: MG11-7 effector repeat
  source 1..36: mol_type = unassigned DNA

SEQ ID NO: 3497 - DNA, 20 bp, unidentified
  misc_feature 1..20: note = Description of Unknown: uncultivated organism sequence
  misc_feature 1..20: note = Category: MG11 effectors repeat
  misc_feature 1..20: note = Description: MG11-8 effector repeat
  source 1..20: mol_type = unassigned DNA
aaatatctacttctgtagat

SEQ ID NO: 3498 - DNA, 20 bp, unidentified
  misc_feature 1..20: note = Description of Unknown: uncultivated organism sequence
  misc_feature 1..20: note = Category: MG11 effectors repeat
  misc_feature 1..20: note = Description: MG11-8 effector repeat
  source 1..20: mol_type = unassigned DNA
aaatatctacttctgtagat

SEQ ID NO: 3499 - DNA, 32 bp, unidentified
  misc_feature 1..32: note = Description of Unknown: uncultivated organism sequence
  misc_feature 1..32: note = Category: MG11 effectors repeat
  misc_feature 1..32: note = Description: MG11-10 effector repeat
  source 1..32: mol_type = unassigned DNA
gcaacattacatgaatacctgctaatgcaggc

SEQ ID NO: 3500 - DNA, 32 bp, unidentified; identical to SEQ ID NO: 3499
  misc_feature 1..32: note = Description of Unknown: uncultivated organism sequence
  misc_feature 1..32: note = Category: MG11 effectors repeat
  misc_feature 1..32: note = Description: MG11-10 effector repeat
  source 1..32: mol_type = unassigned DNA

SEQ ID NO: 3501 - DNA, 32 bp, unidentified; identical to SEQ ID NO: 3499
  misc_feature 1..32: note = Description of Unknown: uncultivated organism sequence
  misc_feature 1..32: note = Category: MG11 effectors repeat
  misc_feature 1..32: note = Description: MG11-10 effector repeat
  source 1..32: mol_type = unassigned DNA

SEQ ID NO: 3502 - DNA, 32 bp, unidentified; identical to SEQ ID NO: 3499
  misc_feature 1..32: note = Description of Unknown: uncultivated organism sequence
  misc_feature 1..32: note = Category: MG11 effectors repeat
  misc_feature 1..32: note = Description: MG11-10 effector repeat
  source 1..32: mol_type = unassigned DNA

SEQ ID NO: 3503 - DNA, 32 bp, unidentified; identical to SEQ ID NO: 3499
  misc_feature 1..32: note = Description of Unknown: uncultivated organism sequence
  misc_feature 1..32: note = Category: MG11 effectors repeat
  misc_feature 1..32: note = Description: MG11-10 effector repeat
  source 1..32: mol_type = unassigned DNA

SEQ ID NO: 3504 - DNA, 32 bp, unidentified; identical to SEQ ID NO: 3499
  misc_feature 1..32: note = Description of Unknown: uncultivated organism sequence
  misc_feature 1..32: note = Category: MG11 effectors repeat
  misc_feature 1..32: note = Description: MG11-10 effector repeat
  source 1..32: mol_type = unassigned DNA

SEQ ID NO: 3505 - DNA, 20 bp, unidentified
  misc_feature 1..20: note = Description of Unknown: uncultivated organism sequence
  misc_feature 1..20: note = Category: MG11 effectors repeat
  misc_feature 1..20: note = Description: MG11-11 effector repeat
  source 1..20: mol_type = unassigned DNA
gaatacctgctaatgcaggc

SEQ ID NO: 3506 - DNA, 20 bp, unidentified
  misc_feature 1..20: note = Description of Unknown: uncultivated organism sequence
  misc_feature 1..20: note = Category: MG11 effectors repeat
  misc_feature 1..20: note = Description: MG11-11 effector repeat
  source 1..20: mol_type = unassigned DNA
gaatacctgctaatgcaggc

SEQ ID NO: 3507 - DNA, 20 bp, unidentified
  misc_feature 1..20: note = Description of Unknown: uncultivated organism sequence
  misc_feature 1..20: note = Category: MG11 effectors repeat
  misc_feature 1..20: note = Description: MG11-12 effector repeat
  source 1..20: mol_type = unassigned DNA
aaatacctgctaatgcaggc

SEQ ID NO: 3508 - DNA, 20 bp, unidentified
  misc_feature 1..20: note = Description of Unknown: uncultivated organism sequence
  misc_feature 1..20: note = Category: MG11 effectors repeat
  misc_feature 1..20: note = Description: MG11-12 effector repeat
  source 1..20: mol_type = unassigned DNA
aaatacctgctaatgcaggc

SEQ ID NO: 3509 - DNA, 20 bp, unidentified
  misc_feature 1..20: note = Description of Unknown: uncultivated organism sequence
  misc_feature 1..20: note = Category: MG11 effectors repeat
  misc_feature 1..20: note = Description: MG11-12 effector repeat
  source 1..20: mol_type = unassigned DNA
aaatacctgctaatgcaggc

SEQ ID NO: 3510 - DNA, 20 bp, unidentified
  misc_feature 1..20: note = Description of Unknown: uncultivated organism sequence
  misc_feature 1..20: note = Category: MG11 effectors repeat
  misc_feature 1..20: note = Description: MG11-12 effector repeat
  source 1..20: mol_type = unassigned DNA
aaatacctgctaatgcaggc

SEQ ID NO: 3511 - DNA, 20 bp, unidentified
  misc_feature 1..20: note = Description of Unknown: uncultivated organism sequence
  misc_feature 1..20: note = Category: MG11 effectors repeat
  misc_feature 1..20: note = Description: MG11-12 effector repeat
  source 1..20: mol_type = unassigned DNA
aaatacctgctaatgcaggc

SEQ ID NO: 3512 - DNA, 20 bp, unidentified
  misc_feature 1..20: note = Description of Unknown: uncultivated organism sequence
  misc_feature 1..20: note = Category: MG11 effectors repeat
  misc_feature 1..20: note = Description: MG11-12 effector repeat
  source 1..20: mol_type = unassigned DNA
aaatacctgctaatgcaggc

SEQ ID NO: 3513 - DNA, 20 bp, unidentified
  misc_feature 1..20: note = Description of Unknown: uncultivated organism sequence
  misc_feature 1..20: note = Category: MG11 effectors repeat
  misc_feature 1..20: note = Description: MG11-12 effector repeat
  source 1..20: mol_type = unassigned DNA
aaatacctgctaatgcaggc

SEQ ID NO: 3514 - DNA, 20 bp, unidentified
  misc_feature 1..20: note = Description of Unknown: uncultivated organism sequence
  misc_feature 1..20: note = Category: MG11 effectors repeat
  misc_feature 1..20: note = Description: MG11-12 effector repeat
  source 1..20: mol_type = unassigned DNA
aaatacctgctaatgcaggc

SEQ ID NO: 3515 - DNA, 20 bp, unidentified
  misc_feature 1..20: note = Description of Unknown: uncultivated organism sequence
  misc_feature 1..20: note = Category: MG11 effectors repeat
  misc_feature 1..20: note = Description: MG11-12 effector repeat
  source 1..20: mol_type = unassigned DNA
aaatacctgctaatgcaggc

SEQ ID NO: 3516 - DNA, 20 bp, unidentified
  misc_feature 1..20: note = Description of Unknown: uncultivated organism sequence
  misc_feature 1..20: note = Category: MG11 effectors repeat
  misc_feature 1..20: note = Description: MG11-12 effector repeat
  source 1..20: mol_type = unassigned DNA
aaatacctgctaatgcaggc

SEQ ID NO: 3517 - DNA, 20 bp, unidentified
  misc_feature 1..20: note = Description of Unknown: uncultivated organism sequence
  misc_feature 1..20: note = Category: MG11 effectors repeat
  misc_feature 1..20: note = Description: MG11-12 effector repeat
  source 1..20: mol_type = unassigned DNA
aaatacctgctaatgcaggc

SEQ ID NO: 3518 - DNA, 20 bp, unidentified
  misc_feature 1..20: note = Description of Unknown: uncultivated organism sequence
  misc_feature 1..20: note = Category: MG11 effectors repeat
  misc_feature 1..20: note = Description: MG11-12 effector repeat
  source 1..20: mol_type = unassigned DNA
aaatacctgctaatgcaggc

SEQ ID NO: 3519 - DNA, 20 bp, unidentified
  misc_feature 1..20: note = Description of Unknown: uncultivated organism sequence
  misc_feature 1..20: note = Category: MG11 effectors repeat
  misc_feature 1..20: note = Description: MG11-12 effector repeat
  source 1..20: mol_type = unassigned DNA
aaatacctgctaatgcaggc

SEQ ID NO: 3520 - DNA, 20 bp, unidentified
  misc_feature 1..20: note = Description of Unknown: uncultivated organism sequence
  misc_feature 1..20: note = Category: MG11 effectors repeat
  misc_feature 1..20: note = Description: MG11-12 effector repeat
  source 1..20: mol_type = unassigned DNA
aaatacctgctaatgcaggc

SEQ ID NO: 3521 - DNA, 37 bp, unidentified
  misc_feature 1..37: note = Description of Unknown: uncultivated organism sequence
  misc_feature 1..37: note = Category: MG11 effectors repeat
  misc_feature 1..37: note = Description: MG11-13 effector repeat
  source 1..37: mol_type = unassigned DNA
ggctataagaccatattaatttctactattcgtagac

SEQ ID NO: 3522 - DNA, 37 bp, unidentified; identical to SEQ ID NO: 3521
  misc_feature 1..37: note = Description of Unknown: uncultivated organism sequence
  misc_feature 1..37: note = Category: MG11 effectors repeat
  misc_feature 1..37: note = Description: MG11-13 effector repeat
  source 1..37: mol_type = unassigned DNA

SEQ ID NO: 3523 - DNA, 37 bp, unidentified
  misc_feature 1..37: note = Description of Unknown: uncultivated organism sequence
  misc_feature 1..37: note = Category: MG11 effectors repeat
  misc_feature 1..37: note = Description: MG11-14 effector repeat
  source 1..37: mol_type = unassigned DNA
ggctataaggccatattaatttctactattcgtagac

SEQ ID NO: 3524 - DNA, 37 bp, unidentified; identical to SEQ ID NO: 3523
  misc_feature 1..37: note = Description of Unknown: uncultivated organism sequence
  misc_feature 1..37: note = Category: MG11 effectors repeat
  misc_feature 1..37: note = Description: MG11-14 effector repeat
  source 1..37: mol_type = unassigned DNA

SEQ ID NO: 3525 - DNA, 36 bp, unidentified
  misc_feature 1..36: note = Description of Unknown: uncultivated organism sequence
  misc_feature 1..36: note = Category: MG11 effectors repeat
  misc_feature 1..36: note = Description: MG11-15 effector repeat
  source 1..36: mol_type = unassigned DNA
ggctatatgccaatataatttctactttacgtagat

SEQ ID NO: 3526 - DNA, 36 bp, unidentified
  misc_feature 1..36: note = Description of Unknown: uncultivated organism sequence
  misc_feature 1..36: note = Category: MG11 effectors repeat
  misc_feature 1..36: note = Description: MG11-16 effector repeat
  source 1..36: mol_type = unassigned DNA
ggctataaaccggtataatttctactattcgtagat

SEQ ID NO: 3527 - DNA, 36 bp, unidentified; identical to SEQ ID NO: 3526
  misc_feature 1..36: note = Description of Unknown: uncultivated organism sequence
  misc_feature 1..36: note = Category: MG11 effectors repeat
  misc_feature 1..36: note = Description: MG11-16 effector repeat
  source 1..36: mol_type = unassigned DNA

SEQ ID NO: 3528 - DNA, 36 bp, unidentified; identical to SEQ ID NO: 3526
  misc_feature 1..36: note = Description of Unknown: uncultivated organism sequence
  misc_feature 1..36: note = Category: MG11 effectors repeat
  misc_feature 1..36: note = Description: MG11-16 effector repeat
  source 1..36: mol_type = unassigned DNA

SEQ ID NO: 3529 - DNA, 35 bp, unidentified
  misc_feature 1..35: note = Description of Unknown: uncultivated organism sequence
  misc_feature 1..35: note = Category: MG11 effectors repeat
  misc_feature 1..35: note = Description: MG11-17 effector repeat
  source 1..35: mol_type = unassigned DNA
gtttataagtaatatttaatttctactttcgtaga

SEQ ID NO: 3530 - DNA, 35 bp, unidentified; identical to SEQ ID NO: 3529
  misc_feature 1..35: note = Description of Unknown: uncultivated organism sequence
  misc_feature 1..35: note = Category: MG11 effectors repeat
  misc_feature 1..35: note = Description: MG11-17 effector repeat
  source 1..35: mol_type = unassigned DNA

SEQ ID NO: 3531 - DNA, 35 bp, unidentified; identical to SEQ ID NO: 3529
  misc_feature 1..35: note = Description of Unknown: uncultivated organism sequence
  misc_feature 1..35: note = Category: MG11 effectors repeat
  misc_feature 1..35: note = Description: MG11-17 effector repeat
  source 1..35: mol_type = unassigned DNA

SEQ ID NO: 3532 - DNA, 35 bp, unidentified; identical to SEQ ID NO: 3529
  misc_feature 1..35: note = Description of Unknown: uncultivated organism sequence
  misc_feature 1..35: note = Category: MG11 effectors repeat
  misc_feature 1..35: note = Description: MG11-17 effector repeat
  source 1..35: mol_type = unassigned DNA

SEQ ID NO: 3533 - DNA, 35 bp, unidentified; identical to SEQ ID NO: 3529
  misc_feature 1..35: note = Description of Unknown: uncultivated organism sequence
  misc_feature 1..35: note = Category: MG11 effectors repeat
  misc_feature 1..35: note = Description: MG11-17 effector repeat
  source 1..35: mol_type = unassigned DNA

SEQ ID NO: 3534 - DNA, 35 bp, unidentified; identical to SEQ ID NO: 3529
  misc_feature 1..35: note = Description of Unknown: uncultivated organism sequence
  misc_feature 1..35: note = Category: MG11 effectors repeat
  misc_feature 1..35: note = Description: MG11-17 effector repeat
  source 1..35: mol_type = unassigned DNA

SEQ ID NO: 3535 - DNA, 35 bp, unidentified; identical to SEQ ID NO: 3529
  misc_feature 1..35: note = Description of Unknown: uncultivated organism sequence
  misc_feature 1..35: note = Category: MG11 effectors repeat
  misc_feature 1..35: note = Description: MG11-17 effector repeat
  source 1..35: mol_type = unassigned DNA

SEQ ID NO: 3536 - DNA, 35 bp, unidentified; identical to SEQ ID NO: 3529
  misc_feature 1..35: note = Description of Unknown: uncultivated organism sequence
  misc_feature 1..35: note = Category: MG11 effectors repeat
  misc_feature 1..35: note = Description: MG11-17 effector repeat
  source 1..35: mol_type = unassigned DNA

SEQ ID NO: 3537 - DNA, 35 bp, unidentified; identical to SEQ ID NO: 3529
  misc_feature 1..35: note = Description of Unknown: uncultivated organism sequence
  misc_feature 1..35: note = Category: MG11 effectors repeat
  misc_feature 1..35: note = Description: MG11-17 effector repeat
  source 1..35: mol_type = unassigned DNA

SEQ ID NO: 3538 - DNA, 35 bp, unidentified; identical to SEQ ID NO: 3529
  misc_feature 1..35: note = Description of Unknown: uncultivated organism sequence
  misc_feature 1..35: note = Category: MG11 effectors repeat
  misc_feature 1..35: note = Description: MG11-17 effector repeat
  source 1..35: mol_type = unassigned DNA

SEQ ID NO: 3539 - skipped

SEQ ID NO: 3540 - DNA, 36 bp, unidentified
  misc_feature 1..36: note = Description of Unknown: uncultivated organism sequence
  misc_feature 1..36: note = Category: MG13 effectors repeat
  misc_feature 1..36: note = Description: MG13-1 effector repeat
  source 1..36: mol_type = unassigned DNA
ggctataaagcctatttaatttctactgttgtagat

SEQ ID NO: 3541 - DNA, 36 bp, unidentified
  misc_feature 1..36: note = Description of Unknown: uncultivated organism sequence
  misc_feature 1..36: note = Category: MG13 effectors repeat
  misc_feature 1..36: note = Description: MG13-3 effector repeat
  source 1..36: mol_type = unassigned DNA
gactataaatcctatttaatttctactattgtagat

SEQ ID NO: 3542 - DNA, 36 bp, unidentified; identical to SEQ ID NO: 3541
  misc_feature 1..36: note = Description of Unknown: uncultivated organism sequence
  misc_feature 1..36: note = Category: MG13 effectors repeat
  misc_feature 1..36: note = Description: MG13-3 effector repeat
  source 1..36: mol_type = unassigned DNA

SEQ ID NO: 3543 - DNA, 36 bp, unidentified; identical to SEQ ID NO: 3541
  misc_feature 1..36: note = Description of Unknown: uncultivated organism sequence
  misc_feature 1..36: note = Category: MG13 effectors repeat
  misc_feature 1..36: note = Description: MG13-4 effector repeat
  source 1..36: mol_type = unassigned DNA

SEQ ID NO: 3544 - DNA, 36 bp, unidentified; identical to SEQ ID NO: 3541
  misc_feature 1..36: note = Description of Unknown: uncultivated organism sequence
  misc_feature 1..36: note = Category: MG13 effectors repeat
  misc_feature 1..36: note = Description: MG13-4 effector repeat
  source 1..36: mol_type = unassigned DNA

SEQ ID NO: 3545 - DNA, 36 bp, unidentified
  misc_feature 1..36: note = Description of Unknown: uncultivated organism sequence
  misc_feature 1..36: note = Category: MG13 effectors repeat
  misc_feature 1..36: note = Description: MG13-6 effector repeat
  source 1..36: mol_type = unassigned DNA
gtctatagatataaagtaatttctactgttgtagat

SEQ ID NO: 3546 - DNA, 36 bp, unidentified
  misc_feature 1..36: note = Description of Unknown: uncultivated organism sequence
  misc_feature 1..36: note = Category: MG13 effectors repeat
  misc_feature 1..36: note = Description: MG13-7 effector repeat
  source 1..36: mol_type = unassigned DNA
gcctataagggccattaaatttctactgttgtagat

SEQ ID NO: 3547 - DNA, 36 bp, unidentified; identical to SEQ ID NO: 3546
  misc_feature 1..36: note = Description of Unknown: uncultivated organism sequence
  misc_feature 1..36: note = Category: MG13 effectors repeat
  misc_feature 1..36: note = Description: MG13-7 effector repeat
  source 1..36: mol_type = unassigned DNA

SEQ ID NO: 3548 - DNA, 36 bp, unidentified; identical to SEQ ID NO: 3546
  misc_feature 1..36: note = Description of Unknown: uncultivated organism sequence
  misc_feature 1..36: note = Category: MG13 effectors repeat
  misc_feature 1..36: note = Description: MG13-7 effector repeat
  source 1..36: mol_type = unassigned DNA

SEQ ID NO: 3549 - DNA, 36 bp, unidentified; identical to SEQ ID NO: 3546
  misc_feature 1..36: note = Description of Unknown: uncultivated organism sequence
  misc_feature 1..36: note = Category: MG13 effectors repeat
  misc_feature 1..36: note = Description: MG13-7 effector repeat
  source 1..36: mol_type = unassigned DNA

SEQ ID NO: 3550 - DNA, 36 bp, unidentified
  misc_feature 1..36: note = Description of Unknown: uncultivated organism sequence
  misc_feature 1..36: note = Category: MG13 effectors repeat
  misc_feature 1..36: note = Description: MG13-8 effector repeat
  source 1..36: mol_type = unassigned DNA
gtctgtaagactaatataatttctactattgtagat

SEQ ID NO: 3551 - DNA, 45 bp, unidentified
  misc_feature 1..45: note = Description of Unknown: uncultivated organism sequence
  misc_feature 1..45: note = Category: MG19 Guide RNA
  misc_feature 1..45: note = Description: MG19-2 dual guide RNA1
  misc_difference 26..45: note = modified_base - a, c, t, g, unknown or other
  source 1..45: mol_type = unassigned DNA
caccgaaagttagggacaaaaaggcnnnnnnnnnnnnnnnnnnnn

SEQ ID NO: 3552 - DNA, 96 bp, unidentified
  misc_feature 1..96: note = Description of Unknown: uncultivated organism sequence
  misc_feature 1..96: note = Category: MG19 Guide RNA
  misc_feature 1..96: note = Description: MG19-2 dual guide RNA2
  source 1..96: mol_type = unassigned DNA
gggtccctaacccaatgcgctcaagcggttttccctcttgataataatcaagagattgccttttcgacttttagtcgttactgcttgagcgcgcaa

SEQ ID NO: 3553 - DNA, 45 bp, unidentified
  misc_feature 1..45: note = Description of Unknown: uncultivated organism sequence
  misc_feature 1..45: note = Category: MG19 Guide RNA
  misc_feature 1..45: note = Description: MG19-3 dual guide RNA1
  misc_difference 26..45: note = modified_base - a, c, t, g, unknown or other
  source 1..45: mol_type = unassigned DNA
catcgaaagttagggactaaaaggcnnnnnnnnnnnnnnnnnnnn

SEQ ID NO: 3554 - DNA, 79 bp, unidentified
  misc_feature 1..79: note = Description of Unknown: uncultivated organism sequence
  misc_feature 1..79: note = Category: MG19 Guide RNA
  misc_feature 1..79: note = Description: MG19-3 dual guide RNA2
  source 1..79: mol_type = unassigned DNA
gagttcctaactcaagcgcctttgcgctttcccgttaacgaaagttaacgatgccttttagtgcagaggcgcaattttt

SEQ ID NO: 3555 - DNA, 45 bp, unidentified
  misc_feature 1..45: note = Description of Unknown: uncultivated organism sequence
  misc_feature 1..45: note = Category: MG19 Guide RNA
  misc_feature 1..45: note = Description: MG19-4 dual guide RNA1
  misc_difference 26..45: note = modified_base - a, c, t, g, unknown or other
  source 1..45: mol_type = unassigned DNA
catcgaaagttaggaaccaaaaggcnnnnnnnnnnnnnnnnnnnn

SEQ ID NO: 3556 - DNA, 101 bp, unidentified
  misc_feature 1..101: note = Description of Unknown: uncultivated organism sequence
  misc_feature 1..101: note = Category: MG19 Guide RNA
  misc_feature 1..101: note = Description: MG19-4 dual guide RNA2
  source 1..101: mol_type = unassigned DNA
gggttcctaaccttagcgctcttgcgctttccccaaccgaaaggttggttgcctttccctttttgggttcccaaaaggaacagtgcaagggcgcgcaattt

SEQ ID NO: 3557 - DNA, 45 bp, unidentified
  misc_feature 1..45: note = Description of Unknown: uncultivated organism sequence
  misc_feature 1..45: note = Category: MG19 Guide RNA
  misc_feature 1..45: note = Description: MG19-5 dual guide RNA1
  misc_difference 26..45: note = modified_base - a, c, t, g, unknown or other
  source 1..45: mol_type = unassigned DNA
catcgaatattaggaaccaaaaggcnnnnnnnnnnnnnnnnnnnn

SEQ ID NO: 3558 - DNA, 81 bp, unidentified
  misc_feature 1..81: note = Description of Unknown: uncultivated organism sequence
  misc_feature 1..81: note = Category: MG19 Guide RNA
  misc_feature 1..81: note = Description: MG19-5 dual guide RNA1
  source 1..81: mol_type = unassigned DNA
gggttcctaatatctatgcgcccttgcgctttccacttcataataaaatgaagtttgccttgtagtgcaagggcgcttttt

SEQ ID NO: 3559 - DNA, 127 bp, unidentified
  misc_feature 1..127: note = Description of Unknown: uncultivated organism sequence
  misc_feature 1..127: note = Category: MG20 Guide RNA
  misc_feature 1..127: note = Description: MG20-1 sgRNA
  misc_difference 108..127: note = modified_base - a, c, t, g, unknown or other
  source 1..127: mol_type = unassigned DNA
atcgtgcttttagtattttctttgagcactcgaaacagaaaggaaaacccaactgtttcacgaatctttgacaacttggaagaaattctaagaaggattcatcaaagnnnnnnnnnnnnnnnnnnnn

SEQ ID NO: 3560 - DNA, 36 bp, unidentified
  misc_feature 1..36: note = Description of Unknown: uncultivated organism sequence
  misc_feature 1..36: note = Category: MG26 effectors repeat
  misc_feature 1..36: note = Description: MG26-1 effector repeat
  source 1..36: mol_type = unassigned DNA
ctcgaaaaccaatatcgaatttctacttttgtagat

SEQ ID NO: 3561 - DNA, 36 bp, unidentified
  misc_feature 1..36: note = Description of Unknown: uncultivated organism sequence
  misc_feature 1..36: note = Category: MG26 effectors repeat
  misc_feature 1..36: note = Description: MG26-5 effector repeat
  source 1..36: mol_type = unassigned DNA
atttaaacataatatctaatctctacttttgtagat

SEQ ID NO: 3562 - DNA, 36 bp, unidentified; identical to SEQ ID NO: 3561
  misc_feature 1..36: note = Description of Unknown: uncultivated organism sequence
  misc_feature 1..36: note = Category: MG26 effectors repeat
  misc_feature 1..36: note = Description: MG26-5 effector repeat
  source 1..36: mol_type = unassigned DNA

SEQ ID NO: 3563 - DNA, 36 bp, unidentified; identical to SEQ ID NO: 3561
  misc_feature 1..36: note = Description of Unknown: uncultivated organism sequence
  misc_feature 1..36: note = Category: MG26 effectors repeat
  misc_feature 1..36: note = Description: MG26-5 effector repeat
  source 1..36: mol_type = unassigned DNA

SEQ ID NO: 3564 - DNA, 36 bp, unidentified; identical to SEQ ID NO: 3561
  misc_feature 1..36: note = Description of Unknown: uncultivated organism sequence
  misc_feature 1..36: note = Category: MG26 effectors repeat
  misc_feature 1..36: note = Description: MG26-5 effector repeat
  source 1..36: mol_type = unassigned DNA

SEQ ID NO: 3565 - DNA, 36 bp, unidentified
  misc_feature 1..36: note = Description of Unknown: uncultivated organism sequence
  misc_feature 1..36: note = Category: MG26 effectors repeat
  misc_feature 1..36: note = Description: MG26-12 effector repeat
  source 1..36: mol_type = unassigned DNA
ctctaaacctcatataaaatttctacttttgtagat

SEQ ID NO: 3566 - DNA, 37 bp, unidentified
  misc_feature 1..37: note = Description of Unknown: uncultivated organism sequence
  misc_feature 1..37: note = Category: MG26 effectors repeat
  misc_feature 1..37: note = Description: MG26-14 effector repeat
  source 1..37: mol_type = unassigned DNA
agtttaaacataatattaaatttctactttggtagat

SEQ ID NO: 3567 - DNA, 37 bp, unidentified; identical to SEQ ID NO: 3566
  misc_feature 1..37: note = Description of Unknown: uncultivated organism sequence
  misc_feature 1..37: note = Category: MG26 effectors repeat
  misc_feature 1..37: note = Description: MG26-14 effector repeat
  source 1..37: mol_type = unassigned DNA

SEQ ID NO: 3568 - DNA, 37 bp, unidentified; identical to SEQ ID NO: 3566
  misc_feature 1..37: note = Description of Unknown: uncultivated organism sequence
  misc_feature 1..37: note = Category: MG26 effectors repeat
  misc_feature 1..37: note = Description: MG26-14 effector repeat
  source 1..37: mol_type = unassigned DNA

SEQ ID NO: 3569 - DNA, 37 bp, unidentified; identical to SEQ ID NO: 3566
  misc_feature 1..37: note = Description of Unknown: uncultivated organism sequence
  misc_feature 1..37: note = Category: MG26 effectors repeat
  misc_feature 1..37: note = Description: MG26-14 effector repeat
  source 1..37: mol_type = unassigned DNA

SEQ ID NO: 3570 - DNA, 37 bp, unidentified; identical to SEQ ID NO: 3566
  misc_feature 1..37: note = Description of Unknown: uncultivated organism sequence
  misc_feature 1..37: note = Category: MG26 effectors repeat
  misc_feature 1..37: note = Description: MG26-14 effector repeat
  source 1..37: mol_type = unassigned DNA

SEQ ID NO: 3571 - DNA, 36 bp, unidentified
  misc_feature 1..36: note = Description of Unknown: uncultivated organism sequence
  misc_feature 1..36: note = Category: MG26 effectors repeat
  misc_feature 1..36: note = Description: MG26-16 effector repeat
  source 1..36: mol_type = unassigned DNA
ctctaaaacccccatctgatttctacttttgtagat

SEQ ID NO: 3572 - DNA, 36 bp, unidentified; identical to SEQ ID NO: 3571
  misc_feature 1..36: note = Description of Unknown: uncultivated organism sequence
  misc_feature 1..36: note = Category: MG26 effectors repeat
  misc_feature 1..36: note = Description: MG26-16 effector repeat
  source 1..36: mol_type = unassigned DNA

SEQ ID NO: 3573 - DNA, 36 bp, unidentified
  misc_feature 1..36: note = Description of Unknown: uncultivated organism sequence
  misc_feature 1..36: note = Category: MG28 effectors repeat
  misc_feature 1..36: note = Description: MG28-1 effector repeat
  source 1..36: mol_type = unassigned DNA
gtctataaagacaattaaatttctactatgtagatc

SEQ ID NO: 3574 - DNA, 36 bp, unidentified; identical to SEQ ID NO: 3573
  misc_feature 1..36: note = Description of Unknown: uncultivated organism sequence
  misc_feature 1..36: note = Category: MG28 effectors repeat
  misc_feature 1..36: note = Description: MG28-1 effector repeat
  source 1..36: mol_type = unassigned DNA

SEQ ID NO: 3575 - DNA, 36 bp, unidentified
  misc_feature 1..36: note = Description of Unknown: uncultivated organism sequence
  misc_feature 1..36: note = Category: MG28 effectors repeat
  misc_feature 1..36: note = Description: MG28-5 effector repeat
  source 1..36: mol_type = unassigned DNA
ggtgttagaccatacaaaatttctactattgtagat

SEQ ID NO: 3576 - DNA, 36 bp, unidentified
  misc_feature 1..36: note = Description of Unknown: uncultivated organism sequence
  misc_feature 1..36: note = Category: MG28 effectors repeat
  misc_feature 1..36: note = Description: MG28-7 effector repeat
  source 1..36: mol_type = unassigned DNA
ggctataatgcctatataatttctactattgtagat

SEQ ID NO: 3577 - DNA, 36 bp, unidentified
  misc_feature 1..36: note = Description of Unknown: uncultivated organism sequence
  misc_feature 1..36: note = Category: MG28 effectors repeat
  misc_feature 1..36: note = Description: MG28-8 effector repeat
  source 1..36: mol_type = unassigned DNA
ggctataatgcctatataatttctactattgtagac

SEQ ID NO: 3578 - DNA, 36 bp, unidentified; identical to SEQ ID NO: 3577
  misc_feature 1..36: note = Description of Unknown: uncultivated organism sequence
  misc_feature 1..36: note = Category: MG28 effectors repeat
  misc_feature 1..36: note = Description: MG28-8 effector repeat
  source 1..36: mol_type = unassigned DNA

SEQ ID NO: 3579 - DNA, 26 bp, unidentified
  misc_feature 1..26: note = Description of Unknown: uncultivated organism sequence
  misc_feature 1..26: note = Category: MG28 effectors repeat
  misc_feature 1..26: note = Description: MG28-10 effector repeat
  source 1..26: mol_type = unassigned DNA
catataaaatttctactattgtagat

SEQ ID NO: 3580 - DNA, 26 bp, unidentified
  misc_feature 1..26: note = Description of Unknown: uncultivated organism sequence
  misc_feature 1..26: note = Category: MG28 effectors repeat
  misc_feature 1..26: note = Description: MG28-10 effector repeat
  source 1..26: mol_type = unassigned DNA
catataaaatttctactattgtagat

SEQ ID NO: 3581 - DNA, 26 bp, unidentified
  misc_feature 1..26: note = Description of Unknown: uncultivated organism sequence
  misc_feature 1..26: note = Category: MG28 effectors repeat
  misc_feature 1..26: note = Description: MG28-10 effector repeat
  source 1..26: mol_type = unassigned DNA
catataaaatttctactattgtagat

SEQ ID NO: 3582 - DNA, 26 bp, unidentified
  misc_feature 1..26: note = Description of Unknown: uncultivated organism sequence
  misc_feature 1..26: note = Category: MG28 effectors repeat
  misc_feature 1..26: note = Description: MG28-10 effector repeat
  source 1..26: mol_type = unassigned DNA
catataaaatttctactattgtagat

SEQ ID NO: 3583 - DNA, 26 bp, unidentified
  misc_feature 1..26: note = Description of Unknown: uncultivated organism sequence
  misc_feature 1..26: note = Category: MG28 effectors repeat
  misc_feature 1..26: note = Description: MG28-10 effector repeat
  source 1..26: mol_type = unassigned DNA
catataaaatttctactattgtagat

SEQ ID NO: 3584 - DNA, 26 bp, unidentified
  misc_feature 1..26: note = Description of Unknown: uncultivated organism sequence
  misc_feature 1..26: note = Category: MG28 effectors repeat
  misc_feature 1..26: note = Description: MG28-11 effector repeat
  source 1..26: mol_type = unassigned DNA
catataaaatttctactattgtagat

SEQ ID NO: 3585 - DNA, 26 bp, unidentified
  misc_feature 1..26: note = Description of Unknown: uncultivated organism sequence
  misc_feature 1..26: note = Category: MG28 effectors repeat
  misc_feature 1..26: note = Description: MG28-11 effector repeat
  source 1..26: mol_type = unassigned DNA
catataaaatttctactattgtagat

SEQ ID NO: 3586 - DNA, 26 bp, unidentified
  misc_feature 1..26: note = Description of Unknown: uncultivated organism sequence
  misc_feature 1..26: note = Category: MG28 effectors repeat
  misc_feature 1..26: note = Description: MG28-11 effector repeat
  source 1..26: mol_type = unassigned DNA
catataaaatttctactattgtagat

SEQ ID NO: 3587 - DNA, 26 bp, unidentified
  misc_feature 1..26: note = Description of Unknown: uncultivated organism sequence
  misc_feature 1..26: note = Category: MG28 effectors repeat
  misc_feature 1..26: note = Description: MG28-11 effector repeat
  source 1..26: mol_type = unassigned DNA
catataaaatttctactattgtagat

SEQ ID NO: 3588 - DNA, 26 bp, unidentified
  misc_feature 1..26: note = Description of Unknown: uncultivated organism sequence
  misc_feature 1..26: note = Category: MG28 effectors repeat
  misc_feature 1..26: note = Description: MG28-11 effector repeat
  source 1..26: mol_type = unassigned DNA
catataaaatttctactattgtagat

SEQ ID NO: 3589 - DNA, 36 bp, unidentified
  misc_feature 1..36: note = Description of Unknown: uncultivated organism sequence
  misc_feature 1..36: note = Category: MG28 effectors repeat
  misc_feature 1..36: note = Description: MG28-12 effector repeat
  source 1..36: mol_type = unassigned DNA
gatgtaaaactacacataatttctactattgtagat

SEQ ID NO: 3590 - DNA, 36 bp, unidentified; identical to SEQ ID NO: 3589
  misc_feature 1..36: note = Description of Unknown: uncultivated organism sequence
  misc_feature 1..36: note = Category: MG28 effectors repeat
  misc_feature 1..36: note = Description: MG28-12 effector repeat
  source 1..36: mol_type = unassigned DNA

SEQ ID NO: 3591 - DNA, 36 bp, unidentified; identical to SEQ ID NO: 3589
  misc_feature 1..36: note = Description of Unknown: uncultivated organism sequence
  misc_feature 1..36: note = Category: MG28 effectors repeat
  misc_feature 1..36: note = Description: MG28-12 effector repeat
  source 1..36: mol_type = unassigned DNA

SEQ ID NO: 3592 - DNA, 36 bp, unidentified; identical to SEQ ID NO: 3589
  misc_feature 1..36: note = Description of Unknown: uncultivated organism sequence
  misc_feature 1..36: note = Category: MG28 effectors repeat
  misc_feature 1..36: note = Description: MG28-12 effector repeat
  source 1..36: mol_type = unassigned DNA

SEQ ID NO: 3593 - DNA, 36 bp, unidentified
  misc_feature 1..36: note = Description of Unknown: uncultivated organism sequence
  misc_feature 1..36: note = Category: MG28 effectors repeat
  misc_feature 1..36: note = Description: MG28-13 effector repeat
  source 1..36: mol_type = unassigned DNA
ggctataactcctcaataatttctactatcgtagat

SEQ ID NO: 3594 - DNA, 36 bp, unidentified; identical to SEQ ID NO: 3593
  misc_feature 1..36: note = Description of Unknown: uncultivated organism sequence
  misc_feature 1..36: note = Category: MG28 effectors repeat
  misc_feature 1..36: note = Description: MG28-13 effector repeat
  source 1..36: mol_type = unassigned DNA

SEQ ID NO: 3595 - DNA, 36 bp, unidentified
  misc_feature 1..36: note = Description of Unknown: uncultivated organism sequence
  misc_feature 1..36: note = Category: MG28 effectors repeat
  misc_feature 1..36: note = Description: MG28-14 effector repeat
  source 1..36: mol_type = unassigned DNA
ggctataactcctcaataatttctactattgtagat

SEQ ID NO: 3596 - DNA, 36 bp, unidentified
  misc_feature 1..36: note = Description of Unknown: uncultivated organism sequence
  misc_feature 1..36: note = Category: MG28 effectors repeat
  misc_feature 1..36: note = Description: MG28-17 effector repeat
  source 1..36: mol_type = unassigned DNA
gtctaacagacatttataatttctactattgtagat

SEQ ID NO: 3597 - DNA, 36 bp, unidentified
  misc_feature 1..36: note = Description of Unknown: uncultivated organism sequence
  misc_feature 1..36: note = Category: MG28 effectors repeat
  misc_feature 1..36: note = Description: MG28-19 effector repeat
  source 1..36: mol_type = unassigned DNA
ggctataagccaaacaaatttctactaagtgtagat

SEQ ID NO: 3598 - DNA, 36 bp, unidentified
  misc_feature 1..36: note = Description of Unknown: uncultivated organism sequence
  misc_feature 1..36: note = Category: MG28 effectors repeat
  misc_feature 1..36: note = Description: MG28-20 effector repeat
  source 1..36: mol_type = unassigned DNA
ggtgtaaaagcatacaaaatatctactattgtagat

SEQ ID NO: 3599 - DNA, 36 bp, unidentified; identical to SEQ ID NO: 3598
  misc_feature 1..36: note = Description of Unknown: uncultivated organism sequence
  misc_feature 1..36: note = Category: MG28 effectors repeat
  misc_feature 1..36: note = Description: MG28-20 effector repeat
  source 1..36: mol_type = unassigned DNA

SEQ ID NO: 3600 - DNA, 36 bp, unidentified
  misc_feature 1..36: note = Description of Unknown: uncultivated organism sequence
  misc_feature 1..36: note = Category: MG28 effectors repeat
  misc_feature 1..36: note = Description: MG28-22 effector repeat
  source 1..36: mol_type = unassigned DNA
ggctataaaccaaacaaatttctactaaatgtagat

SEQ ID NO: 3601 - DNA, 36 bp, unidentified; identical to SEQ ID NO: 3600
  misc_feature 1..36: note = Description of Unknown: uncultivated organism sequence
  misc_feature 1..36: note = Category: MG28 effectors repeat
  misc_feature 1..36: note = Description: MG28-22 effector repeat
  source 1..36: mol_type = unassigned DNA

SEQ ID NO: 3602 - DNA, 36 bp, unidentified; identical to SEQ ID NO: 3600
  misc_feature 1..36: note = Description of Unknown: uncultivated organism sequence
  misc_feature 1..36: note = Category: MG28 effectors repeat
  misc_feature 1..36: note = Description: MG28-22 effector repeat
  source 1..36: mol_type = unassigned DNA

SEQ ID NO: 3603 - DNA, 36 bp, unidentified
  misc_feature 1..36: note = Description of Unknown: uncultivated organism sequence
  misc_feature 1..36: note = Category: MG28 effectors repeat
  misc_feature 1..36: note = Description: MG28-23 effector repeat
  source 1..36: mol_type = unassigned DNA
cgtgtttagatatacagaatttctactattgtagat

SEQ ID NO: 3604 - DNA, 36 bp, unidentified
  misc_feature 1..36: note = Description of Unknown: uncultivated organism sequence
  misc_feature 1..36: note = Category: MG28 effectors repeat
  misc_feature 1..36: note = Description: MG28-24 effector repeat
  source 1..36: mol_type = unassigned DNA
gtctatagaacccttttaatttctactattgtagat

SEQ ID NO: 3605 - DNA, 28 bp, unidentified
  misc_feature 1..28: note = Description of Unknown: uncultivated organism sequence
  misc_feature 1..28: note = Category: MG28 effectors repeat
  misc_feature 1..28: note = Description: MG28-25 effector repeat
  source 1..28: mol_type = unassigned DNA
ataagatttaatatctactattgtagat

SEQ ID NO: 3606 - DNA, 28 bp, unidentified
  misc_feature 1..28: note = Description of Unknown: uncultivated organism sequence
  misc_feature 1..28: note = Category: MG28 effectors repeat
  misc_feature 1..28: note = Description: MG28-25 effector repeat
  source 1..28: mol_type = unassigned DNA
ataagatttaatatctactattgtagat

SEQ ID NO: 3607 - DNA, 28 bp, unidentified
  misc_feature 1..28: note = Description of Unknown: uncultivated organism sequence
  misc_feature 1..28: note = Category: MG28 effectors repeat
  misc_feature 1..28: note = Description: MG28-25 effector repeat
  source 1..28: mol_type = unassigned DNA
ataagatttaatatctactattgtagat

SEQ ID NO: 3608 - RNA, 43 nt, synthetic construct
  misc_feature 1..43: note = Description of Artificial Sequence: Synthetic oligonucleotide
  misc_feature 1..43: note = Category: MG28 effectors, MG30 active effectors crRNA sequence
  misc_feature 1..43: note = Description: MG28-1, MG30-1 crRNA sequence
  misc_difference 20..43: note = modified_base - a, c, u, g, unknown or other
  source 1..43: mol_type = other RNA
aatttctactattgtagatnnnnnnnnnnnnnnnnnnnnnnnn

SEQ ID NO: 3609 - RNA, 44 nt, unidentified
  misc_feature 1..44: note = Description of Unknown: MG28, MG29, MG30, MG31 crRNA sequence
  misc_feature 1..44: note = Category: MG28, MG29, MG30, MG31 crRNA sequence
  misc_feature 1..44: note = Description: MG28, MG29, MG30, MG31 crRNA sequence example 8
  misc_difference 21..44: note = modified_base - a, c, u, g, unknown or other
  source 1..44: mol_type = unassigned RNA
taatttctactgttgtagatnnnnnnnnnnnnnnnnnnnnnnnn

SEQ ID NO: 3610 - DNA, 36 bp, unidentified
  misc_feature 1..36: note = Description of Unknown: uncultivated organism sequence
  misc_feature 1..36: note = Category: MG29 effectors repeat
  misc_feature 1..36: note = Description: MG29-1 effector repeat
  source 1..36: mol_type = unassigned DNA
gtctaagaccttacttaaatttctactgttgtagat

SEQ ID NO: 3611 - DNA, 36 bp, unidentified
  misc_feature 1..36: note = Description of Unknown: uncultivated organism sequence
  misc_feature 1..36: note = Category: MG29 effectors repeat
  misc_feature 1..36: note = Description: MG29-7 effector repeat
  source 1..36: mol_type = unassigned DNA
gtctaagaccgaccttaaatttctactgttgtagat

SEQ ID NO: 3612 - DNA, 43 bp, unidentified
  misc_feature 1..43: note = Description of Unknown: uncultivated organism sequence
  misc_feature 1..43: note = Category: MG29 Guide RNA
  misc_feature 1..43: note = Description: MG29-5 sgRNA
  misc_difference 20..43: note = modified_base - a, c, t, g, unknown or other
  misc_difference 20..43: note = misc_feature - This region may encompass 20 or 24 nucleotides
  source 1..43: mol_type = unassigned DNA
aatttctacagttgtagatnnnnnnnnnnnnnnnnnnnnnnnn

SEQ ID NO: 3613 - DNA, 36 bp, unidentified
  misc_feature 1..36: note = Description of Unknown: uncultivated organism sequence
  misc_feature 1..36: note = Category: MG30 effectors repeat
  misc_feature 1..36: note = Description: MG30-1 effector repeat
  source 1..36: mol_type = unassigned DNA
ctctagggctacccttaaatttctactattgtagat

SEQ ID NO: 3614 - DNA, 36 bp, unidentified; identical to SEQ ID NO: 3613
  misc_feature 1..36: note = Description of Unknown: uncultivated organism sequence
  misc_feature 1..36: note = Category: MG30 effectors repeat
  misc_feature 1..36: note = Description: MG30-1 effector repeat
  source 1..36: mol_type = unassigned DNA

SEQ ID NO: 3615 - DNA, 36 bp, unidentified; identical to SEQ ID NO: 3613
  misc_feature 1..36: note = Description of Unknown: uncultivated organism sequence
  misc_feature 1..36: note = Category: MG30 effectors repeat
  misc_feature 1..36: note = Description: MG30-1 effector repeat
  source 1..36: mol_type = unassigned DNA

SEQ ID NO: 3616 - DNA, 36 bp, unidentified
  misc_feature 1..36: note = Description of Unknown: uncultivated organism sequence
  misc_feature 1..36: note = Category: MG31 effectors repeat
  misc_feature 1..36: note = Description: MG31-1 effector repeat
  source 1..36: mol_type = unassigned DNA
gtttaagacaaatacaaaatttctactgttgtagat

SEQ ID NO: 3617 - DNA, 29 bp, unidentified
  misc_feature 1..29: note = Description of Unknown: uncultivated organism sequence
  misc_feature 1..29: note = Category: MG31 effectors repeat
  misc_feature 1..29: note = Description: MG31-5 effector repeat
  source 1..29: mol_type = unassigned DNA
actgatatagaatttctactgttgtagat

SEQ ID NO: 3618 - DNA, 29 bp, unidentified
  misc_feature 1..29: note = Description of Unknown: uncultivated organism sequence
  misc_feature 1..29: note = Category: MG31 effectors repeat
  misc_feature 1..29: note = Description: MG31-5 effector repeat
  source 1..29: mol_type = unassigned DNA
actgatatagaatttctactgttgtagat

SEQ ID NO: 3619 - DNA, 29 bp, unidentified
  misc_feature 1..29: note = Description of Unknown: uncultivated organism sequence
  misc_feature 1..29: note = Category: MG31 effectors repeat
  misc_feature 1..29: note = Description: MG31-5 effector repeat
  source 1..29: mol_type = unassigned DNA
actgatatagaatttctactgttgtagat

SEQ ID NO: 3620 - DNA, 36 bp, unidentified
  misc_feature 1..36: note = Description of Unknown: uncultivated organism sequence
  misc_feature 1..36: note = Category: MG31 effectors repeat
  misc_feature 1..36: note = Description: MG31-8 effector repeat
  source 1..36: mol_type = unassigned DNA
cgttaagacaaatacaaaatttctactgtcgtagat

SEQ ID NO: 3621 - DNA, 36 bp, unidentified; identical to SEQ ID NO: 3620
  misc_feature 1..36: note = Description of Unknown: uncultivated organism sequence
  misc_feature 1..36: note = Category: MG31 effectors repeat
  misc_feature 1..36: note = Description: MG31-8 effector repeat
  source 1..36: mol_type = unassigned DNA

SEQ ID NO: 3622 - DNA, 36 bp, unidentified; identical to SEQ ID NO: 3620
  misc_feature 1..36: note = Description of Unknown: uncultivated organism sequence
  misc_feature 1..36: note = Category: MG31 effectors repeat
  misc_feature 1..36: note = Description: MG31-8 effector repeat
  source 1..36: mol_type = unassigned DNA

SEQ ID NO: 3623 - DNA, 36 bp, unidentified
  misc_feature 1..36: note = Description of Unknown: uncultivated organism sequence
  misc_feature 1..36: note = Category: MG31 effectors repeat
  misc_feature 1..36: note = Description: MG31-9 effector repeat
  source 1..36: mol_type = unassigned DNA
gtttcaaagtgaactaaaatttctactgttgtagat

SEQ ID NO: 3624 - DNA, 36 bp, unidentified
  misc_feature 1..36: note = Description of Unknown: uncultivated organism sequence
  misc_feature 1..36: note = Category: MG31 effectors repeat
  misc_feature 1..36: note = Description: MG31-10 effector repeat
  source 1..36: mol_type = unassigned DNA
gtttgaacttcatactaaatttctactgttgtagat

SEQ ID NO: 3625 - DNA, 20 bp, unidentified
  misc_feature 1..20: note = Description of Unknown: uncultivated organism sequence
  misc_feature 1..20: note = Category: MG31 effectors repeat
  misc_feature 1..20: note = Description: MG31-11 effector repeat
  source 1..20: mol_type = unassigned DNA
gaatttctactgttgtagat

SEQ ID NO: 3626 - DNA, 20 bp, unidentified
  misc_feature 1..20: note = Description of Unknown: uncultivated organism sequence
  misc_feature 1..20: note = Category: MG31 effectors repeat
  misc_feature 1..20: note = Description: MG31-11 effector repeat
  source 1..20: mol_type = unassigned DNA
gaatttctactgttgtagat

SEQ ID NO: 3627 - DNA, 36 bp, unidentified
  misc_feature 1..36: note = Description of Unknown: uncultivated organism sequence
  misc_feature 1..36: note = Category: MG31 effectors repeat
  misc_feature 1..36: note = Description: MG31-16 effector repeat
  source 1..36: mol_type = unassigned DNA
gtttcaaactgaataagaatttctactgttgtagat

SEQ ID NO: 3628 - DNA, 36 bp, unidentified
  misc_feature 1..36: note = Description of Unknown: uncultivated organism sequence
  misc_feature 1..36: note = Category: MG31 effectors repeat
  misc_feature 1..36: note = Description: MG31-17 effector repeat
  source 1..36: mol_type = unassigned DNA
gtttagaacccaaataaaatttctactgttgtagat

SEQ ID NO: 3629 - DNA, 36 bp, unidentified; identical to SEQ ID NO: 3628
  misc_feature 1..36: note = Description of Unknown: uncultivated organism sequence
  misc_feature 1..36: note = Category: MG31 effectors repeat
  misc_feature 1..36: note = Description: MG31-18 effector repeat
  source 1..36: mol_type = unassigned DNA

SEQ ID NO: 3630 - DNA, 36 bp, unidentified; identical to SEQ ID NO: 3628
  misc_feature 1..36: note = Description of Unknown: uncultivated organism sequence
  misc_feature 1..36: note = Category: MG31 effectors repeat
  misc_feature 1..36: note = Description: MG31-18 effector repeat
  source 1..36: mol_type = unassigned DNA

SEQ ID NO: 3631 - DNA, 36 bp, unidentified; identical to SEQ ID NO: 3628
  misc_feature 1..36: note = Description of Unknown: uncultivated organism sequence
  misc_feature 1..36: note = Category: MG31 effectors repeat
  misc_feature 1..36: note = Description: MG31-19 effector repeat
  source 1..36: mol_type = unassigned DNA

SEQ ID NO: 3632 - DNA, 36 bp, unidentified; identical to SEQ ID NO: 3628
  misc_feature 1..36: note = Description of Unknown: uncultivated organism sequence
  misc_feature 1..36: note = Category: MG31 effectors repeat
  misc_feature 1..36: note = Description: MG31-17, MG31-18, MG31-19 effectors repeat
  source 1..36: mol_type = unassigned DNA

SEQ ID NO: 3633 - DNA, 36 bp, unidentified
  misc_feature 1..36: note = Description of Unknown: uncultivated organism sequence
  misc_feature 1..36: note = Category: MG32 effectors repeat
  misc_feature 1..36: note = Description: MG32-1 effector repeat
  source 1..36: mol_type = unassigned DNA
ctttaagagactccttcaatttctactgttgtagat

SEQ ID NO: 3634 - DNA, 36 bp, unidentified; identical to SEQ ID NO: 3633
  misc_feature 1..36: note = Description of Unknown: uncultivated organism sequence
  misc_feature 1..36: note = Category: MG32 effectors repeat
  misc_feature 1..36: note = Description: MG32-1 effector repeat
  source 1..36: mol_type = unassigned DNA

SEQ ID NO: 3635 - RNA, 36 nt, synthetic construct
  misc_feature 1..36: note = Description of Artificial Sequence: Synthetic oligonucleotide
  misc_feature 1..36: note = Category: MG37 effectors repeat
  misc_feature 1..36: note = Description: MG37-1 repeat
  source 1..36: mol_type = other RNA
ggcgcgctggccagcgcgctcatgatcgactgacac

SEQ ID NO: 3636 - RNA, 115 nt, synthetic construct
  misc_feature 1..115: note = Description of Artificial Sequence: Synthetic polynucleotide
  misc_feature 1..115: note = Category: MG37 sgRNA1
  misc_feature 1..115: note = Description: MG37-1 sgRNA1
  misc_difference 92..115: note = modified_base - a, c, u, g, unknown or other
  source 1..115: mol_type = other RNA
tcgcctaaagggcgaaatgatctgcgttcagtgtcgtcgccttcaatgtgcgcatcaccgcagaggtcgatcagaaatgatcgactgacacnnnnnnnnnnnnnnnnnnnnnnnn

SEQ ID NO: 3637 - RNA, 93 nt, synthetic construct
  misc_feature 1..93: note = Description of Artificial Sequence: Synthetic oligonucleotide
  misc_feature 1..93: note = Category: MG37 sgRNA2
  misc_feature 1..93: note = Description: MG37-1 sgRNA2
  misc_difference 70..93: note = modified_base - a, c, u, g, unknown or other
  source 1..93: mol_type = other RNA
tcgcctaaagggcgaaatgatctgcgttcagtgtcgtcgccttcaatgtgcgcatcaccgcagagacacnnnnnnnnnnnnnnnnnnnnnnnn

SEQ ID NO: 3638 - RNA, 73 nt, synthetic construct
  misc_feature 1..73: note = Description of Artificial Sequence: Synthetic oligonucleotide
  misc_feature 1..73: note = Category: MG37 tracrRNA
  misc_feature 1..73: note = Description: MG37-1 tracrRNA
  source 1..73: mol_type = other RNA
tcgcctaaagggcgaaatgatctgcgttcagtgtcgtcgccttcaatgtgcgcatcaccgcagaggtcgatca

SEQ ID NO: 3639 - RNA, 36 nt, synthetic construct
  misc_feature 1..36: note = Description of Artificial Sequence: Synthetic oligonucleotide
  misc_feature 1..36: note = Category: MG37 repeat
  misc_feature 1..36: note = Description: MG37-2 repeat
  source 1..36: mol_type = other RNA
ccagaagcgagcgtggcattgcgaggtgacggacac

SEQ ID NO: 3640 - RNA, 111 nt, synthetic construct
  misc_feature 1..111: note = Description of Artificial Sequence: Synthetic polynucleotide
  misc_feature 1..111: note = Category: MG37 sgRNA1
  misc_feature 1..111: note = Description: MG37-2 sgRNA1
  misc_difference 88..111: note = modified_base - a, c, u, g, unknown or other
  source 1..111: mol_type = other RNA
ttcctcgacaggaggaaacaacgctgcggaacgtgtcgtcccctttaatgggcttggtaccgcaggtcaccgaaaggtgacggacacnnnnnnnnnnnnnnnnnnnnnnnn

SEQ ID NO: 3641 - RNA, 95 nt, synthetic construct
  misc_feature 1..95: note = Description of Artificial Sequence: Synthetic oligonucleotide
  misc_feature 1..95: note = Category: MG37 sgRNA2
  misc_feature 1..95: note = Description: MG37-2 sgRNA2
  misc_difference 72..95: note = modified_base - a, c, u, g, unknown or other
  source 1..95: mol_type = other RNA
ttcctcgacaggaggaaacaacgctgcggaacgtgtcgtcccctttaatgggcttggtaccgcagggacacnnnnnnnnnnnnnnnnnnnnnnnn

SEQ ID NO: 3642 - RNA, 71 nt, synthetic construct
  misc_feature 1..71: note = Description of Artificial Sequence: Synthetic oligonucleotide
  misc_feature 1..71: note = Category: MG37 tracrRNA
  misc_feature 1..71: note = Description: MG37-2 tracrRNA
  source 1..71: mol_type = other RNA
ttcctcgacaggaggaaacaacgctgcggaacgtgtcgtcccctttaatgggcttggtaccgcaggtcacc

SEQ ID NO: 3643 - RNA, 37 nt, synthetic construct
  misc_feature 1..37: note = Description of Artificial Sequence: Synthetic oligonucleotide
  misc_feature 1..37: note = Category: MG37 repeat
  misc_feature 1..37: note = Description: MG37-3 repeat
  source 1..37: mol_type = other RNA
cctcgccgacggtgaaaggaaccagatctgctgacac

SEQ ID NO: 3644 - RNA, 116 nt, synthetic construct
  misc_feature 1..116: note = Description of Artificial Sequence: Synthetic polynucleotide
  misc_feature 1..116: note = Category: MG37 sgRNA1
  misc_feature 1..116: note = Description: MG37-3 sgRNA1
  misc_difference 93..116: note = modified_base - a, c, u, g, unknown or other
  source 1..116: mol_type = other RNA
aataaaatggtcctacaggggctgaaatcgcgcgggtgtgtcatcggcttcaatgcctttagcaccgcgagcagatgaaaatctgctgacacnnnnnnnnnnnnnnnnnnnnnnnn

SEQ ID NO: 3645 - RNA, 98 nt, synthetic construct
  misc_feature 1..98: note = Description of Artificial Sequence: Synthetic oligonucleotide
  misc_feature 1..98: note = Category: MG37 sgRNA2
  misc_feature 1..98: note = Description: MG37-3 sgRNA2
  misc_difference 75..98: note = modified_base - a, c, u, g, unknown or other
  source 1..98: mol_type = other RNA
aataaaatggtcctacaggggctgaaatcgcgcgggtgtgtcatcggcttcaatgcctttagcaccgcggacacnnnnnnnnnnnnnnnnnnnnnnnn

SEQ ID NO: 3646 - RNA, 76 nt, synthetic construct
  misc_feature 1..76: note = Description of Artificial Sequence: Synthetic oligonucleotide
  misc_feature 1..76: note = Category: MG37 tracrRNA
  misc_feature 1..76: note = Description: MG37-3 tracrRNA
  source 1..76: mol_type = other RNA
aataaaatggtcctacaggggctgaaatcgcgcgggtgtgtcatcggcttcaatgcctttagcaccgcgagcagat

SEQ ID NO: 3647 - RNA, 36 nt, synthetic construct
  misc_feature 1..36: note = Description of Artificial Sequence: Synthetic oligonucleotide
  misc_feature 1..36: note = Category: MG37 repeat
  misc_feature 1..36: note = Description: MG37-4 repeat
  source 1..36: mol_type = other RNA
ggcggcgaattcgccggcatctcgatcgaccgacac

SEQ ID NO: 3648 - RNA, 131 nt, synthetic construct
  misc_feature 1..131: note = Description of Artificial Sequence: Synthetic polynucleotide
  misc_feature 1..131: note = Category: MG37 sgRNA1
  misc_feature 1..131: note = Description: MG37-4 sgRNA1
  misc_difference 108..131: note = modified_base - a, c, u, g, unknown or other
  source 1..131: mol_type = other RNA
tatattgaaagcaatccgctacaggcggagggaactccgtgaacgtgtcttccccttcgatgggcttggcacacggggtcaatcgaggaaactcgatcgaccgacacnnnnnnnnnnnnnnnnnnnnnnnn

SEQ ID NO: 3649 - RNA, 105 nt, synthetic construct
  misc_feature 1..105: note = Description of Artificial Sequence: Synthetic polynucleotide
  misc_feature 1..105: note = Category: MG37 sgRNA2
  misc_feature 1..105: note = Description: MG37-4 sgRNA2
  misc_difference 82..105: note = modified_base - a, c, u, g, unknown or other
  source 1..105: mol_type = other RNA
tatattgaaagcaatccgctacaggcggagggaactccgtgaacgtgtcttccccttcgatgggcttggcacacgggacacnnnnnnnnnnnnnnnnnnnnnnnn

SEQ ID NO: 3650 - RNA, 87 nt, synthetic construct
  misc_feature 1..87: note = Description of Artificial Sequence: Synthetic oligonucleotide
  misc_feature 1..87: note = Category: MG37 tracrRNA
  misc_feature 1..87: note = Description: MG37-4 tracrRNA
  source 1..87: mol_type = other RNA
tatattgaaagcaatccgctacaggcggagggaactccgtgaacgtgtcttccccttcgatgggcttggcacacggggtcaatcgag

SEQ ID NO: 3651 - RNA, 36 nt, synthetic construct
  misc_feature 1..36: note = Description of Artificial Sequence: Synthetic oligonucleotide
  misc_feature 1..36: note = Category: MG37 repeat1
  misc_feature 1..36: note = Description: MG37-5 repeat1
  source 1..36: mol_type = other RNA
gtatcaccggttgaagcacacctcattgatggacac

SEQ ID NO: 3652 - RNA, 120 nt, synthetic construct
  misc_feature 1..120: note = Description of Artificial Sequence: Synthetic polynucleotide
  misc_feature 1..120: note = Category: MG37 sgRNA1
  misc_feature 1..120: note = Description: MG37-5 sgRNA1
  misc_difference 97..120: note = modified_base - a, c, u, g, unknown or other
  source 1..120: mol_type = other RNA
taataagaagctcctatagggagtgtattttttacggaatgtgtcttcctattaaattagtttagcaccgtaacattaatgaaaattgatggacacnnnnnnnnnnnnnnnnnnnnnnnn

SEQ ID NO: 3653 - RNA, 102 nt, synthetic construct
  misc_feature 1..102: note = Description of Artificial Sequence: Synthetic polynucleotide
  misc_feature 1..102: note = Category: MG37 sgRNA2
  misc_feature 1..102: note = Description: MG37-5 sgRNA2
  misc_difference 79..102: note = modified_base - a, c, u, g, unknown or other
  source 1..102: mol_type = other RNA
taataagaagctcctatagggagtgtattttttacggaatgtgtcttcctattaaattagtttagcaccgtaagacacnnnnnnnnnnnnnnnnnnnnnnnn

SEQ ID NO: 3654 - RNA, 80 nt, synthetic construct
  misc_feature 1..80: note = Description of Artificial Sequence: Synthetic oligonucleotide
  misc_feature 1..80: note = Category: MG37 tracrRNA1
  misc_feature 1..80: note = Description: MG37-5 tracrRNA1
  source 1..80: mol_type = other RNA
taataagaagctcctatagggagtgtattttttacggaatgtgtcttcctattaaattagtttagcaccgtaacattaat

SEQ ID NO: 3655 - RNA, 36 nt, synthetic construct
  misc_feature 1..36: note = Description of Artificial Sequence: Synthetic oligonucleotide
  misc_feature 1..36: note = Category: MG37 repeat
  misc_feature 1..36: note = Description: MG37-6 repeat
  source 1..36: mol_type = other RNA
gtcgcatcgcttccgagaaaccaacgctgttggcac

SEQ ID NO: 3656 - RNA, 110 nt, synthetic construct
  misc_feature 1..110: note = Description of Artificial Sequence: Synthetic polynucleotide
  misc_feature 1..110: note = Category: MG37 sgRNA1
  misc_feature 1..110: note = Description: MG37-6 sgRNA1
  misc_difference 87..110: note = modified_base - a, c, u, g, unknown or other
  source 1..110: mol_type = other RNA
aaggacgtcgaaatcgatgtcgctctgtggtatgtgcctccgtcttaaatgactttaagccacaggacagcgaaagctgttggcacnnnnnnnnnnnnnnnnnnnnnnnn

SEQ ID NO: 3657 - RNA, 94 nt, synthetic construct
  misc_feature 1..94: note = Description of Artificial Sequence: Synthetic oligonucleotide
  misc_feature 1..94: note = Category: MG37 sgRNA2
  misc_feature 1..94: note = Description: MG37-6 sgRNA2
  misc_difference 71..94: note = modified_base - a, c, u, g, unknown or other
  source 1..94: mol_type = other RNA
aaggacgtcgaaatcgatgtcgctctgtggtatgtgcctccgtcttaaatgactttaagccacagggcacnnnnnnnnnnnnnnnnnnnnnnnn

SEQ ID NO: 3658 - RNA, 71 nt, synthetic construct
  misc_feature 1..71: note = Description of Artificial Sequence: Synthetic oligonucleotide
  misc_feature 1..71: note = Category: MG37 tracrRNA
  misc_feature 1..71: note = Description: MG37-6 tracrRNA
  source 1..71: mol_type = other RNA
aaggacgtcgaaatcgatgtcgctctgtggtatgtgcctccgtcttaaatgactttaagccacaggacagc

SEQ ID NO: 3659 - RNA, 36 nt, synthetic construct
  misc_feature 1..36: note = Description of Artificial Sequence: Synthetic oligonucleotide
  misc_feature 1..36: note = Category: MG37 repeat
  misc_feature 1..36: note = Description: MG37-7 repeat
  source 1..36: mol_type = other RNA
ggagcatcgagcaacccgaacttcatctactgacac

SEQ ID NO: 3660 - RNA, 126 nt, synthetic construct
  misc_feature 1..126: note = Description of Artificial Sequence: Synthetic polynucleotide
  misc_feature 1..126: note = Category: MG37 sgRNA1
  misc_feature 1..126: note = Description: MG37-7 sgRNA1
  misc_difference 103..126: note = modified_base - a, c, u, g, unknown or other
  source 1..126: mol_type = other RNA
attatcaatgtatcctacaggggtacggaattacgcggcatgtgtcgtcgccttcaatggccttggcaccgcgtggtagaatgagaaatcatctactgacacnnnnnnnnnnnnnnnnnnnnnnnn

SEQ ID NO: 3661 - RNA, 104 nt, synthetic construct
  misc_feature 1..104: note = Description of Artificial Sequence: Synthetic polynucleotide
  misc_feature 1..104: note = Category: MG37 sgRNA2
  misc_feature 1..104: note = Description: MG37-7 sgRNA2
  misc_difference 81..104: note = modified_base - a, c, u, g, unknown or other
  source 1..104: mol_type = other RNA
attatcaatgtatcctacaggggtacggaattacgcggcatgtgtcgtcgccttcaatggccttggcaccgcgtggacacnnnnnnnnnnnnnnnnnnnnnnnn

SEQ ID NO: 3662 - RNA, 84 nt, synthetic construct
  misc_feature 1..84: note = Description of Artificial Sequence: Synthetic oligonucleotide
  misc_feature 1..84: note = Category: MG37 tracrRNA
  misc_feature 1..84: note = Description: MG37-7 tracrRNA
  source 1..84: mol_type = other RNA
attatcaatgtatcctacaggggtacggaattacgcggcatgtgtcgtcgccttcaatggccttggcaccgcgtggtagaatga

SEQ ID NO: 3663 - RNA, 37 nt, synthetic construct
  misc_feature 1..37: note = Description of Artificial Sequence: Synthetic oligonucleotide
  misc_feature 1..37: note = Category: MG53 repeat
  misc_feature 1..37: note = Description: MG53-1 repeat
  source 1..37: mol_type = other RNA
cataacgcccagaagaggacctgatcgcaccggacac

SEQ ID NO: 3664 - RNA, 205 nt, synthetic construct
  misc_feature 1..205: note = Description of Artificial Sequence: Synthetic polynucleotide
  misc_feature 1..205: note = Category: MG53 sgRNA1
  misc_feature 1..205: note = Description: MG53-1 sgRNA1
  misc_difference 182..205: note = modified_base - a, c, u, g, unknown or other
  source 1..205: mol_type = other RNA
ttcgggcctgggttccgtctataggtcgggactcacgctgagaatgtgtctcgccggaatgtggctgcgggcgacccccgcaactgggctcggcgcgggcaaccgcgacgaggctatggcgtctcagcgggtgcgttcagtttctcttctgaaaagaagaggacctgatcgcaccggacacnnnnnnnnnnnnnnnnnnnnnnnn

SEQ ID NO: 3665 - RNA, 175 nt, synthetic construct
  misc_feature 1..175: note = Description of Artificial Sequence: Synthetic polynucleotide
  misc_feature 1..175: note = Category: MG53 sgRNA2
  misc_feature 1..175: note = Description: MG53-1 sgRNA2
  misc_difference 152..175: note = modified_base - a, c, u, g, unknown or other
  source 1..175: mol_type = other RNA
ttcgggcctgggttccgtctataggtcgggactcacgctgagaatgtgtctcgccggaatgtggctgcgggcgacccccgcaactgggctcggcgcgggcaaccgcgacgaggctatggcgtctcagcgggtgcggaaacgcaccggacacnnnnnnnnnnnnnnnnnnnnnnnn

SEQ ID NO: 3666 - RNA, 210 nt, synthetic construct
  misc_feature 1..210: note = Description of Artificial Sequence: Synthetic polynucleotide
  misc_feature 1..210: note = Category: MG53 sgRNA3
  misc_feature 1..210: note = Description: MG53-1 sgRNA3
  misc_difference 187..210: note = modified_base - a, c, u, g, unknown or other
  source 1..210: mol_type = other RNA
ttcggccgccgtaggttcatattcgtactgtggccttcgggcctgggttccgtctataggtcgggactcacgctgagaatgtgtctcgccggaatgtggctgcgggcgacccccgcaactgggctcggcgcgggcaaccgcgacgaggctatggcgtctcagcgggtgcggaaacgcaccggacacnnnnnnnnnnnnnnnnnnnnnnnn

SEQ ID NO: 3667 - RNA, 240 nt, synthetic construct
  misc_feature 1..240: note = Description of Artificial Sequence: Synthetic polynucleotide
  misc_feature 1..240: note = Category: MG53 sgRNA4
  misc_feature 1..240: note = Description: MG53-1 sgRNA4
  misc_difference 217..240: note = modified_base - a, c, u, g, unknown or other
  source 1..240: mol_type = other RNA
ttcggccgccgtaggttcatattcgtactgtggccttcgggcctgggttccgtctataggtcgggactcacgctgagaatgtgtctcgccggaatgtggctgcgggcgacccccgcaactgggctcggcgcgggcaaccgcgacgaggctatggcgtctcagcgggtgcgttcagtttctcttctgaaaagaagaggacctgatcgcaccggacacnnnnnnnnnnnnnnnnnnnnnnnn

SEQ ID NO: 3668 - RNA, 150 nt, synthetic construct
  misc_feature 1..150: note = Description of Artificial Sequence: Synthetic polynucleotide
  misc_feature 1..150: note = Category: MG53 tracrRNA1
  misc_feature 1..150: note = Description: MG53-1 tracrRNA1
  source 1..150: mol_type = other RNA
ttcgggcctgggttccgtctataggtcgggactcacgctgagaatgtgtctcgccggaatgtggctgcgggcgacccccgcaactgggctcggcgcgggcaaccgcgacgaggctatggcgtctcagcgggtgcgttcagtttctcttct

SEQ ID NO: 3669 - RNA, 228 nt, synthetic construct
  misc_feature 1..228: note = Description of Artificial Sequence: Synthetic polynucleotide
  misc_feature 1..228: note = Category: MG53 tracrRNA2
  misc_feature 1..228: note = Description: MG53-1 tracrRNA2
  source 1..228: mol_type = other RNA
gccacacgggcaatacggggctttgctcgcagaccccttgactttcggccgccgtaggttcatattcgtactgtggccttcgggcctgggttccgtctataggtcgggactcacgctgagaatgtgtctcgccggaatgtggctgcgggcgacccccgcaactgggctcggcgcgggcaaccgcgacgaggctatggcgtctcagcgggtgcgttcagtttctcttct

SEQ ID NO: 3670 - RNA, 36 nt, synthetic construct
  misc_feature 1..36: note = Description of Artificial Sequence: Synthetic oligonucleotide
  misc_feature 1..36: note = Category: MG54 repeat
  misc_feature 1..36: note = Description: MG54-1 repeat
  source 1..36: mol_type = other RNA
gccgcgtcccccgacgcgaccctgatcgatggacac

SEQ ID NO: 3671 - RNA, 172 nt, synthetic construct
  misc_feature 1..172: note = Description of Artificial Sequence: Synthetic polynucleotide
  misc_feature 1..172: note = Category: MG54 sgRNA1
  misc_feature 1..172: note = Description: MG54-1 sgRNA1
  misc_difference 149..172: note = modified_base - a, c, u, g, unknown or other
  source 1..172: mol_type = other RNA
cgggcagccacgcagccgtcgttcctgagtgtcaacacgtgctggccctaaggcgctcgcgccgatggggacccgacaacggcggggcgacccgcccgcggcggcacggacggcgacggcatcgatcaggaaactgatcgatggacacnnnnnnnnnnnnnnnnnnnnnnnn

SEQ ID NO: 3672 - RNA, 217 nt, synthetic construct
  misc_feature 1..217: note = Description of Artificial Sequence: Synthetic polynucleotide
  misc_feature 1..217: note = Category: MG54 sgRNA2
  misc_feature 1..217: note = Description: MG54-1 sgRNA2
  misc_difference 194..217: note = modified_base - a, c, u, g, unknown or other
  source 1..217: mol_type = other RNA
gcatcggcggggtcgcgtccgcccgcccagcggctataggcaggccgggcagccacgcagccgtcgttcctgagtgtcaacacgtgctggccctaaggcgctcgcgccgatggggacccgacaacggcggggcgacccgcccgcggcggcacggacggcgacggcatcgatcaggaaactgatcgatggacacnnnnnnnnnnnnnnnnnnnnnnnn

SEQ ID NO: 3673 - RNA, 145 nt, synthetic construct
  misc_feature 1..145: note = Description of Artificial Sequence: Synthetic polynucleotide
  misc_feature 1..145: note = Category: MG54 tracrRNA1
  misc_feature 1..145: note = Description: MG54-1 tracrRNA1
  source 1..145: mol_type = other RNA
cgggcagccacgcagccgtcgttcctgagtgtcaacacgtgctggccctaaggcgctcgcgccgatggggacccgacaacggcggggcgacccgcccgcggcggcacggacggcgacggcatcgatcagcttcgcgtcggcccgg

SEQ ID NO: 3674 - RNA, 129 nt, synthetic construct
  misc_feature 1..129: note = Description of Artificial Sequence: Synthetic polynucleotide
  misc_feature 1..129: note = Category: MG54 tracrRNA2
  misc_feature 1..129: note = Description: MG54-1 tracrRNA2
  source 1..129: mol_type = other RNA
cgggcagccacgcagccgtcgttcctgagtgtcaacacgtgctggccctaaggcgctcgcgccgatggggacccgacaacggcggggcgacccgcccgcggcggcacggacggcgacggcatcgatcag

SEQ ID NO: 3675 - RNA, 108 nt, synthetic construct
  misc_feature 1..108: note = Description of Artificial Sequence: Synthetic polynucleotide
  misc_feature 1..108: note = Category: MG54 tracrRNA3
  misc_feature 1..108: note = Description: MG54-1 tracrRNA3
  source 1..108: mol_type = other RNA
ttcctgagtgtcaacacgtgctggccctaaggcgctcgcgccgatggggacccgacaacggcggggcgacccgcccgcggcggcacggacggcgacggcatcgatcag

SEQ ID NO: 3676 - RNA, 215 nt, synthetic construct
  misc_feature 1..215: note = Description of Artificial Sequence: Synthetic polynucleotide
  misc_feature 1..215: note = Category: MG54 tracrRNA4
  misc_feature 1..215: note = Description: MG54-1 tracrRNA4
  source 1..215: mol_type = other RNA
ttccgtggtatactgcactcgtggagcatcggcggggtcgcgtccgcccgcccagcggctataggcaggccgggcagccacgcagccgtcgttcctgagtgtcaacacgtgctggccctaaggcgctcgcgccgatggggacccgacaacggcggggcgacccgcccgcggcggcacggacggcgacggcatcgatcagcttcgcgtcggcccgg

SEQ ID NO: 3677 - skipped

SEQ ID NO: 3678 - RNA, 44 nt, synthetic construct
  misc_feature 1..44: note = Description of Artificial Sequence: Synthetic oligonucleotide
  misc_feature 1..44: note = Category: MG56 effectors crRNA
  misc_feature 1..44: note = Description: MG56-1, MG56-2 effectors crRNA
  misc_difference 21..44: note = modified_base - a, c, u, g, unknown or other
  source 1..44: mol_type = other RNA
aaatttctacttttgtagatnnnnnnnnnnnnnnnnnnnnnnnn

SEQ ID NO: 3679 - DNA, 36 bp, unidentified
  misc_feature 1..36: note = Description of Unknown: uncultivated organism sequence
  misc_feature 1..36: note = Category: MG56 effectors repeat
  misc_feature 1..36: note = Description: MG56-1 effector repeat
  source 1..36: mol_type = unassigned DNA
ctcaaatagacctatcaaatttctacttttgtagat

SEQ ID NO: 3680 - DNA, 36 bp, unidentified; identical to SEQ ID NO: 3679
  misc_feature 1..36: note = Description of Unknown: uncultivated organism sequence
  misc_feature 1..36: note = Category: MG56 effectors repeat
  misc_feature 1..36: note = Description: MG56-1, MG60-8 effectors repeat
  source 1..36: mol_type = unassigned DNA

SEQ ID NO: 3681 - DNA, 36 bp, unidentified
  misc_feature 1..36: note = Description of Unknown: uncultivated organism sequence
  misc_feature 1..36: note = Category: MG57 effectors repeat
  misc_feature 1..36: note = Description: MG57-3 effector repeat
  source 1..36: mol_type = unassigned DNA
gtttgaatttcatactaaatttctactgttgtagat

SEQ ID NO: 3682 - DNA, 36 bp, unidentified
  misc_feature 1..36: note = Description of Unknown: uncultivated organism sequence
  misc_feature 1..36: note = Category: MG57 effectors repeat
  misc_feature 1..36: note = Description: MG57-7 effector repeat
  source 1..36: mol_type = unassigned DNA
ctctaaataacaaataaaatttctactattgtagat

SEQ ID NO: 3683 - DNA, 36 bp, unidentified; identical to SEQ ID NO: 3682
  misc_feature 1..36: note = Description of Unknown: uncultivated organism sequence
  misc_feature 1..36: note = Category: MG57 effectors repeat
  misc_feature 1..36: note = Description: MG57-7 effector repeat
  source 1..36: mol_type = unassigned DNA

SEQ ID NO: 3684 - DNA, 36 bp, unidentified; identical to SEQ ID NO: 3682
  misc_feature 1..36: note = Description of Unknown: uncultivated organism sequence
  misc_feature 1..36: note = Category: MG57 effectors repeat
  misc_feature 1..36: note = Description: MG57-7 effector repeat
  source 1..36: mol_type = unassigned DNA

SEQ ID NO: 3685 - DNA, 36 bp, unidentified; identical to SEQ ID NO: 3682
  misc_feature 1..36: note = Description of Unknown: uncultivated organism sequence
  misc_feature 1..36: note = Category: MG57 effectors repeat
  misc_feature 1..36: note = Description: MG57-7 effector repeat
  source 1..36: mol_type = unassigned DNA

SEQ ID NO: 3686 - DNA, 36 bp, unidentified
  misc_feature 1..36: note = Description of Unknown: uncultivated organism sequence
  misc_feature 1..36: note = Category: MG57 effectors repeat
  misc_feature 1..36: note = Description: MG57-13 effector repeat
  source 1..36: mol_type = unassigned DNA
gtctaaaaggcttagacaatttctactattgtagat

SEQ ID NO: 3687 - DNA, 36 bp, unidentified
  misc_feature 1..36: note = Description of Unknown: uncultivated organism sequence
  misc_feature 1..36: note = Category: MG57 effectors repeat
  misc_feature 1..36: note = Description: MG57-14 effector repeat
  source 1..36: mol_type = unassigned DNA
ggctacaagccatattaaatttctactattgtagat

SEQ ID NO: 3688 - DNA, 36 bp, unidentified; identical to SEQ ID NO: 3687
  misc_feature 1..36: note = Description of Unknown: uncultivated organism sequence
  misc_feature 1..36: note = Category: MG57 effectors repeat
  misc_feature 1..36: note = Description: MG57-14 effector repeat
  source 1..36: mol_type = unassigned DNA

SEQ ID NO: 3689 - DNA, 36 bp, unidentified; identical to SEQ ID NO: 3687
  misc_feature 1..36: note = Description of Unknown: uncultivated organism sequence
  misc_feature 1..36: note = Category: MG57 effectors repeat
  misc_feature 1..36: note = Description: MG57-14 effector repeat
  source 1..36: mol_type = unassigned DNA

SEQ ID NO: 3690 - DNA, 23 bp, unidentified
  misc_feature 1..23: note = Description of Unknown: uncultivated organism sequence
  misc_feature 1..23: note = Category: MG57 effectors repeat
  misc_feature 1..23: note = Description: MG57-15 effector repeat
  source 1..23: mol_type = unassigned DNA
acaaaatttctactattgtagat

SEQ ID NO: 3691 - DNA, 23 bp, unidentified
  misc_feature 1..23: note = Description of Unknown: uncultivated organism sequence
  misc_feature 1..23: note = Category: MG57 effectors repeat
  misc_feature 1..23: note = Description: MG57-15 effector repeat
  source 1..23: mol_type = unassigned DNA
acaaaatttctactattgtagat

SEQ ID NO: 3692 - DNA, 23 bp, unidentified
  misc_feature 1..23: note = Description of Unknown: uncultivated organism sequence
  misc_feature 1..23: note = Category: MG57 effectors repeat
  misc_feature 1..23: note = Description: MG57-15 effector repeat
  source 1..23: mol_type = unassigned DNA
acaaaatttctactattgtagat

SEQ ID NO: 3693 - DNA, 23 bp, unidentified
  misc_feature 1..23: note = Description of Unknown: uncultivated organism sequence
  misc_feature 1..23: note = Category: MG57 effectors repeat
  misc_feature 1..23: note = Description: MG57-15 effector repeat
  source 1..23: mol_type = unassigned DNA
acaaaatttctactattgtagat

SEQ ID NO: 3694 - DNA, 23 bp, unidentified
  misc_feature 1..23: note = Description of Unknown: uncultivated organism sequence
  misc_feature 1..23: note = Category: MG57 effectors repeat
  misc_feature 1..23: note = Description: MG57-15 effector repeat
  source 1..23: mol_type = unassigned DNA
acaaaatttctactattgtagat

SEQ ID NO: 3695 - DNA, 43 bp, synthetic construct
  misc_feature 1..43: note = Description of Artificial Sequence: Synthetic oligonucleotide
  misc_feature 1..43: note = Category: MG57 guide RNA
  misc_feature 1..43: note = Description: MG57-1 sgRNA
  misc_difference 20..43: note = modified_base - a, c, t, g, unknown or other
  source 1..43: mol_type = other DNA
aatttctactatcgtagatnnnnnnnnnnnnnnnnnnnnnnnn

SEQ ID NO: 3696 - DNA, 44 bp, synthetic construct
  misc_feature 1..44: note = Description of Artificial Sequence: Synthetic oligonucleotide
  misc_feature 1..44: note = Category: MG57 guide RNA
  misc_feature 1..44: note = Description: MG57-2 sgRNA
  misc_difference 21..44: note = modified_base - a, c, t, g, unknown or other
  source 1..44: mol_type = other DNA
aatttctactagtgtagattnnnnnnnnnnnnnnnnnnnnnnnn

SEQ ID NO: 3697 - DNA, 36 bp, unidentified
  misc_feature 1..36: note = Description of Unknown: uncultivated organism sequence
  misc_feature 1..36: note = Category: MG58 effectors repeat
  misc_feature 1..36: note = Description: MG58-1 effector repeat
  source 1..36: mol_type = unassigned DNA
gtttagaaattatataagatttctacttttgtagat

SEQ ID NO: 3698 - DNA, 36 bp, unidentified; identical to SEQ ID NO: 3697
  misc_feature 1..36: note = Description of Unknown: uncultivated organism sequence
  misc_feature 1..36: note = Category: MG58 effectors repeat
  misc_feature 1..36: note = Description: MG58-1, MG58-6, MG60-1 effectors repeat
  source 1..36: mol_type = unassigned DNA

SEQ ID NO: 3699 - DNA, 36 bp, unidentified
  misc_feature 1..36: note = Description of Unknown: uncultivated organism sequence
  misc_feature 1..36: note = Category: MG58 effectors repeat
  misc_feature 1..36: note = Description: MG58-2 effector repeat
  source 1..36: mol_type = unassigned DNA
atcaattactagtttccaatttctacttttgtagat

SEQ ID NO: 3700 - DNA, 36 bp, unidentified
  misc_feature 1..36: note = Description of Unknown: uncultivated organism sequence
  misc_feature 1..36: note = Category: MG58 effectors repeat
  misc_feature 1..36: note = Description: MG58-3 effector repeat
  source 1..36: mol_type = unassigned DNA
gtttagaacttatataagatttctacttttgtagat

SEQ ID NO: 3701 - DNA, 36 bp, unidentified; identical to SEQ ID NO: 3700
  misc_feature 1..36: note = Description of Unknown: uncultivated organism sequence
  misc_feature 1..36: note = Category: MG58 effectors repeat
  misc_feature 1..36: note = Description: MG58-3, MG58-7 effectors repeat
  source 1..36: mol_type = unassigned DNA

SEQ ID NO: 3702 - DNA, 36 bp, unidentified
  misc_feature 1..36: note = Description of Unknown: uncultivated organism sequence
  misc_feature 1..36: note = Category: MG58 effectors repeat
  misc_feature 1..36: note = Description: MG58-4 effector repeat
  source 1..36: mol_type = unassigned DNA
gtttagaagttatataagatttctacttttgtagat

SEQ ID NO: 3703 - DNA, 36 bp, unidentified; identical to SEQ ID NO: 3702
  misc_feature 1..36: note = Description of Unknown: uncultivated organism sequence
  misc_feature 1..36: note = Category: MG58 effectors repeat
  misc_feature 1..36: note = Description: MG58-4, MG58-11, MG60-7 effectors repeat
  source 1..36: mol_type = unassigned DNA

SEQ ID NO: 3704 - DNA, 36 bp, unidentified; identical to SEQ ID NO: 3697
  misc_feature 1..36: note = Description of Unknown: uncultivated organism sequence
  misc_feature 1..36: note = Category: MG58 effectors repeat
  misc_feature 1..36: note = Description: MG58-6 effector repeat
  source 1..36: mol_type = unassigned DNA

SEQ ID NO: 3705 - DNA, 36 bp, unidentified; identical to SEQ ID NO: 3700
  misc_feature 1..36: note = Description of Unknown: uncultivated organism sequence
  misc_feature 1..36: note = Category: MG58 effectors repeat
  misc_feature 1..36: note = Description: MG58-7 effector repeat
  source 1..36: mol_type = unassigned DNA

SEQ ID NO: 3706 - DNA, 36 bp, unidentified
  misc_feature 1..36: note = Description of Unknown: uncultivated organism sequence
  misc_feature 1..36: note = Category: MG58 effectors repeat
  misc_feature 1..36: note = Description: MG58-10 effector repeat
  source 1..36: mol_type = unassigned DNA
gtttagaagttatataagatttctacttctgtagat

SEQ ID NO: 3707 - DNA, 36 bp, unidentified; identical to SEQ ID NO: 3706
  misc_feature 1..36: note = Description of Unknown: uncultivated organism sequence
  misc_feature 1..36: note = Category: MG58 effectors repeat
  misc_feature 1..36: note = Description: MG58-10 effector repeat
  source 1..36: mol_type = unassigned DNA

SEQ ID NO: 3708 - DNA, 36 bp, unidentified; identical to SEQ ID NO: 3702
  misc_feature 1..36: note = Description of Unknown: uncultivated organism sequence
  misc_feature 1..36: note = Category: MG58 effectors repeat
  misc_feature 1..36: note = Description: MG58-11 effector repeat
  source 1..36: mol_type = unassigned DNA

SEQ ID NO: 3709 - DNA, 36 bp, unidentified
  misc_feature 1..36: note = Description of Unknown: uncultivated organism sequence
  misc_feature 1..36: note = Category: MG58 effectors repeat
  misc_feature 1..36: note = Description: MG58-12 effector repeat
  source 1..36: mol_type = unassigned DNA
gtttagaaactatataagatttctacttttgtagat

SEQ ID NO: 3710 - DNA, 36 bp, unidentified; identical to SEQ ID NO: 3709
  misc_feature 1..36: note = Description of Unknown: uncultivated organism sequence
  misc_feature 1..36: note = Category: MG58 effectors repeat
  misc_feature 1..36: note = Description: MG58-12, MG58-13 effectors repeat
  source 1..36: mol_type = unassigned DNA

SEQ ID NO: 3711 - DNA, 36 bp, unidentified; identical to SEQ ID NO: 3709
  misc_feature 1..36: note = Description of Unknown: uncultivated organism sequence
  misc_feature 1..36: note = Category: MG58 effectors repeat
  misc_feature 1..36: note = Description: MG58-13 effector repeat
  source 1..36: mol_type = unassigned DNA

SEQ ID NO: 3712 - DNA, 36 bp, unidentified
  misc_feature 1..36: note = Description of Unknown: uncultivated organism sequence
  misc_feature 1..36: note = Category: MG59 effectors repeat
  misc_feature 1..36: note = Description: MG59-1 effector repeat
  source 1..36: mol_type = unassigned DNA
gtcaaacactccgccacaatttctactgtcgtagat

SEQ ID NO: 3713 - DNA, 36 bp, unidentified; identical to SEQ ID NO: 3712
  misc_feature 1..36: note = Description of Unknown: uncultivated organism sequence
  misc_feature 1..36: note = Category: MG59 effectors repeat
  misc_feature 1..36: note = Description: MG59-1 effector repeat
  source 1..36: mol_type = unassigned DNA

SEQ ID NO: 3714 - DNA, 36 bp, unidentified; identical to SEQ ID NO: 3712
  misc_feature 1..36: note = Description of Unknown: uncultivated organism sequence
  misc_feature 1..36: note = Category: MG59 effectors repeat
  misc_feature 1..36: note = Description: MG59-1 effector repeat
  source 1..36: mol_type = unassigned DNA

SEQ ID NO: 3715 - DNA, 32 bp, unidentified
  misc_feature 1..32: note = Description of Unknown: uncultivated organism sequence
  misc_feature 1..32: note = Category: MG59 effectors repeat
  misc_feature 1..32: note = Description: MG59-2 effector repeat
  source 1..32: mol_type = unassigned DNA
agggcccctcataaatttctactgttgtagat

SEQ ID NO: 3716 - DNA, 32 bp, unidentified; identical to SEQ ID NO: 3715
  misc_feature 1..32: note = Description of Unknown: uncultivated organism sequence
  misc_feature 1..32: note = Category: MG59 effectors repeat
  misc_feature 1..32: note = Description: MG59-2 effector repeat
  source 1..32: mol_type = unassigned DNA

SEQ ID NO: 3717 - DNA, 36 bp, unidentified
  misc_feature 1..36: note = Description of Unknown: uncultivated organism sequence
  misc_feature 1..36: note = Category: MG59 effectors repeat
  misc_feature 1..36: note = Description: MG59-3 effector repeat
  source 1..36: mol_type = unassigned DNA
gtttccccacgtggttaaatttctacttttgtagat

SEQ ID NO: 3718 - DNA, 36 bp, unidentified; identical to SEQ ID NO: 3717
  misc_feature 1..36: note = Description of Unknown: uncultivated organism sequence
  misc_feature 1..36: note = Category: MG59 effectors repeat
  misc_feature 1..36: note = Description: MG59-3 effector repeat
  source 1..36: mol_type = unassigned DNA

SEQ ID NO: 3719 - DNA, 29 bp, unidentified
  misc_feature 1..29: note = Description of Unknown: uncultivated organism sequence
  misc_feature 1..29: note = Category: MG59 effectors repeat
  misc_feature 1..29: note = Description: MG59-4 effector repeat
  source 1..29: mol_type = unassigned DNA
cacgtggtttaatttctacttttgtagat

SEQ ID NO: 3720 - DNA, 20 bp, unidentified
  misc_feature 1..20: note = Description of Unknown: uncultivated organism sequence
  misc_feature 1..20: note = Category: MG59 effectors repeat
  misc_feature 1..20: note = Description: MG59-5 effector repeat
  source 1..20: mol_type = unassigned DNA
aaatctctactgtcgtagag

SEQ ID NO: 3721 - DNA, 20 bp, unidentified
  misc_feature 1..20: note = Description of Unknown: uncultivated organism sequence
  misc_feature 1..20: note = Category: MG59 effectors repeat
  misc_feature 1..20: note = Description: MG59-5 effector repeat
  source 1..20: mol_type = unassigned DNA
aaatctctactgtcgtagag

SEQ ID NO: 3722 - DNA, 20 bp, unidentified
  misc_feature 1..20: note = Description of Unknown: uncultivated organism sequence
  misc_feature 1..20: note = Category: MG59 effectors repeat
  misc_feature 1..20: note = Description: MG59-5 effector repeat
  source 1..20: mol_type = unassigned DNA
aaatctctactgtcgtagag

SEQ ID NO: 3723 - DNA, 19 bp, unidentified
  misc_feature 1..19: note = Description of Unknown: uncultivated organism sequence
  misc_feature 1..19: note = Category: MG59 effectors repeat
  misc_feature 1..19: note = Description: MG59-6 effector repeat
  source 1..19: mol_type = unassigned DNA
aatttctactgttgtagat

SEQ ID NO: 3724 - DNA, 36 bp, unidentified
  misc_feature 1..36: note = Description of Unknown: uncultivated organism sequence
  misc_feature 1..36: note = Category: MG59 effectors repeat
  misc_feature 1..36: note = Description: MG59-7 effector repeat
  source 1..36: mol_type = unassigned DNA
gttttgcaatcttccctaatttctactgttgtagat

SEQ ID NO: 3725 - DNA, 36 bp, unidentified; identical to SEQ ID NO: 3724
  misc_feature 1..36: note = Description of Unknown: uncultivated organism sequence
  misc_feature 1..36: note = Category: MG59 effectors repeat
  misc_feature 1..36: note = Description: MG59-7, MG59-9 effectors repeat
  source 1..36: mol_type = unassigned DNA

SEQ ID NO: 3726 - DNA, 36 bp, unidentified
  misc_feature 1..36: note = Description of Unknown: uncultivated organism sequence
  misc_feature 1..36: note = Category: MG59 effectors repeat
  misc_feature 1..36: note = Description: MG59-8 effector repeat
  source 1..36: mol_type = unassigned DNA
cttttgcaatcttccctaatttctactgttgtagat

SEQ ID NO: 3727 - DNA, 36 bp, unidentified; identical to SEQ ID NO: 3726
  misc_feature 1..36: note = Description of Unknown: uncultivated organism sequence
  misc_feature 1..36: note = Category: MG59 effectors repeat
  misc_feature 1..36: note = Description: MG59-8 effector repeat
  source 1..36: mol_type = unassigned DNA

SEQ ID NO: 3728 - DNA, 36 bp, unidentified; identical to SEQ ID NO: 3724
  misc_feature 1..36: note = Description of Unknown: uncultivated organism sequence
  misc_feature 1..36: note = Category: MG59 effectors repeat
  misc_feature 1..36: note = Description: MG59-9 effector repeat
  source 1..36: mol_type = unassigned DNA

SEQ ID NO: 3729 - DNA, 43 bp, synthetic construct
  misc_feature 1..43: note = Description of Artificial Sequence: Synthetic oligonucleotide
  misc_feature 1..43: note = Category: MG59 guide RNA
  misc_feature 1..43: note = Description: MG59-1 sgRNA
  misc_difference 20..43: note = modified_base - a, c, t, g, unknown or other
  source 1..43: mol_type = other DNA
aatttctactgtcgtagatnnnnnnnnnnnnnnnnnnnnnnnn

SEQ ID NO: 3730 - DNA, 43 bp, synthetic construct
  misc_feature 1..43: note = Description of Artificial Sequence: Synthetic oligonucleotide
  misc_feature 1..43: note = Category: MG59 guide RNA
  misc_feature 1..43: note = Description: MG59-2 sgRNA
  misc_difference 20..43: note = modified_base - a, c, t, g, unknown or other
  source 1..43: mol_type = other DNA
aatttctactgttgtagatnnnnnnnnnnnnnnnnnnnnnnnn

SEQ ID NO: 3731 - DNA, 36 bp, unidentified
  misc_feature 1..36: note = Description of Unknown: uncultivated organism sequence
  misc_feature 1..36: note = Category: MG60 effectors repeat
  misc_feature 1..36: note = Description: MG60-3 effector repeat
  source 1..36: mol_type = unassigned DNA
gtttaaacatagtatctaatttctactttggtagat

SEQ ID NO: 3732 - DNA, 36 bp, unidentified
  misc_feature 1..36: note = Description of Unknown: uncultivated organism sequence
  misc_feature 1..36: note = Category: MG60 effectors repeat
  misc_feature 1..36: note = Description: MG60-6 effector repeat
  source 1..36: mol_type = unassigned DNA
gttgaaagaataaataaagtacctgctgttgcaggc

SEQ ID NO: 3733 - DNA, 36 bp, unidentified; identical to SEQ ID NO: 3702
  misc_feature 1..36: note = Description of Unknown: uncultivated organism sequence
  misc_feature 1..36: note = Category: MG60 effectors repeat
  misc_feature 1..36: note = Description: MG60-7 effector repeat
  source 1..36: mol_type = unassigned DNA

SEQ ID NO: 3734 - RNA, 44 nt, synthetic construct
  misc_feature 1..44: note = Description of Artificial Sequence: Synthetic oligonucleotide
  misc_feature 1..44: note = Category: MG61 effectors crRNA
  misc_feature 1..44: note = Description: MG61-1 effector crRNA
  misc_difference 21..44: note = modified_base - a, c, u, g, unknown or other
  source 1..44: mol_type = other RNA
aaatacctgctattgcaggcnnnnnnnnnnnnnnnnnnnnnnnn

SEQ ID NO: 3735 - RNA, 43 nt, synthetic construct
  misc_feature 1..43: note = Description of Artificial Sequence: Synthetic oligonucleotide
  misc_feature 1..43: note = Category: MG61 effectors crRNA
  misc_feature 1..43: note = Description: MG61-2 effector crRNA
  misc_difference 20..43: note = modified_base - a, c, u, g, unknown or other
  source 1..43: mol_type = other RNA
aaatgcctgctggtgcaggnnnnnnnnnnnnnnnnnnnnnnnn

SEQ ID NO: 3736 - DNA, 36 bp, unidentified
  misc_feature 1..36: note = Description of Unknown: uncultivated organism sequence
  misc_feature 1..36: note = Category: MG61 effectors repeat
  misc_feature 1..36: note = Description: MG61-1 effector repeat
  source 1..36: mol_type = unassigned DNA
ggtatataccatcaataaatacctgctattgcaggc

SEQ ID NO: 3737 - DNA, 36 bp, unidentified; identical to SEQ ID NO: 3736
  misc_feature 1..36: note = Description of Unknown: uncultivated organism sequence
  misc_feature 1..36: note = Category: MG61 effectors repeat
  misc_feature 1..36: note = Description: MG61-1 effector repeat
  source 1..36: mol_type = unassigned DNA

SEQ ID NO: 3738 - DNA, 36 bp, unidentified; identical to SEQ ID NO: 3736
  misc_feature 1..36: note = Description of Unknown: uncultivated organism sequence
  misc_feature 1..36: note = Category: MG61 effectors repeat
  misc_feature 1..36: note = Description: MG61-1 effector repeat
  source 1..36: mol_type = unassigned DNA

SEQ ID NO: 3739 - DNA, 36 bp, unidentified; identical to SEQ ID NO: 3736
  misc_feature 1..36: note = Description of Unknown: uncultivated organism sequence
  misc_feature 1..36: note = Category: MG61 effectors repeat
  misc_feature 1..36: note = Description: MG61-1 effector repeat
  source 1..36: mol_type = unassigned DNA

SEQ ID NO: 3740 - DNA, 35 bp, unidentified
  misc_feature 1..35: note = Description of Unknown: uncultivated organism sequence
  misc_feature 1..35: note = Category: MG61 effectors repeat
  misc_feature 1..35: note = Description: MG61-2 effector repeat
  source 1..35: mol_type = unassigned DNA
attataaggataatagaaatacctgctggtgcagg

SEQ ID NO: 3741 - DNA, 35 bp, unidentified; identical to SEQ ID NO: 3740
  misc_feature 1..35: note = Description of Unknown: uncultivated organism sequence
  misc_feature 1..35: note = Category: MG61 effectors repeat
  misc_feature 1..35: note = Description: MG61-2 effector repeat
  source 1..35: mol_type = unassigned DNA

SEQ ID NO: 3742 - DNA, 35 bp, unidentified; identical to SEQ ID NO: 3740
  misc_feature 1..35: note = Description of Unknown: uncultivated organism sequence
  misc_feature 1..35: note = Category: MG61 effectors repeat
  misc_feature 1..35: note = Description: MG61-2 effector repeat
  source 1..35: mol_type = unassigned DNA

SEQ ID NO: 3743 - DNA, 35 bp, unidentified; identical to SEQ ID NO: 3740
  misc_feature 1..35: note = Description of Unknown: uncultivated organism sequence
  misc_feature 1..35: note = Category: MG61 effectors repeat
  misc_feature 1..35: note = Description: MG61-2 effector repeat
  source 1..35: mol_type = unassigned DNA

SEQ ID NO: 3744 - DNA, 35 bp, unidentified; identical to SEQ ID NO: 3740
  misc_feature 1..35: note = Description of Unknown: uncultivated organism sequence
  misc_feature 1..35: note = Category: MG61 effectors repeat
  misc_feature 1..35: note = Description: MG61-2 effector repeat
  source 1..35: mol_type = unassigned DNA

SEQ ID NO: 3745 - DNA, 35 bp, unidentified; identical to SEQ ID NO: 3740
  misc_feature 1..35: note = Description of Unknown: uncultivated organism sequence
  misc_feature 1..35: note = Category: MG61 effectors repeat
  misc_feature 1..35: note = Description: MG61-2 effector repeat
  source 1..35: mol_type = unassigned DNA

SEQ ID NO: 3746 - DNA, 35 bp, unidentified
  misc_feature 1..35: note = Description of Unknown: uncultivated organism sequence
  misc_feature 1..35: note = Category: MG61 effectors repeat
  misc_feature 1..35: note = Description: MG61-3 effector repeat
  source 1..35: mol_type = unassigned DNA
gttataaagaacaaataaatgcctgctgttgcagg

SEQ ID NO: 3747 - DNA, 35 bp, unidentified; identical to SEQ ID NO: 3746
  misc_feature 1..35: note = Description of Unknown: uncultivated organism sequence
  misc_feature 1..35: note = Category: MG61 effectors repeat
  misc_feature 1..35: note = Description: MG61-3 effector repeat
  source 1..35: mol_type = unassigned DNA

SEQ ID NO: 3748 - DNA, 35 bp, unidentified; identical to SEQ ID NO: 3746
  misc_feature 1..35: note = Description of Unknown: uncultivated organism sequence
  misc_feature 1..35: note = Category: MG61 effectors repeat
  misc_feature 1..35: note = Description: MG61-3 effector repeat
  source 1..35: mol_type = unassigned DNA

SEQ ID NO: 3749 - DNA, 35 bp, unidentified; identical to SEQ ID NO: 3746
  misc_feature 1..35: note = Description of Unknown: uncultivated organism sequence
  misc_feature 1..35: note = Category: MG61 effectors repeat
  misc_feature 1..35: note = Description: MG61-3 effector repeat
  source 1..35: mol_type = unassigned DNA

SEQ ID NO: 3750 - DNA, 35 bp, unidentified; identical to SEQ ID NO: 3746
  misc_feature 1..35: note = Description of Unknown: uncultivated organism sequence
  misc_feature 1..35: note = Category: MG61 effectors repeat
  misc_feature 1..35: note = Description: MG61-3 effector repeat
  source 1..35: mol_type = unassigned DNA

SEQ ID NO: 3751 - DNA, 35 bp, unidentified; identical to SEQ ID NO: 3746
  misc_feature 1..35: note = Description of Unknown: uncultivated organism sequence
  misc_feature 1..35: note = Category: MG61 effectors repeat
  misc_feature 1..35: note = Description: MG61-3, MG61-12 effectors repeat
  source 1..35: mol_type = unassigned DNA

SEQ ID NO: 3752 - DNA, 36 bp, unidentified
  misc_feature 1..36: note = Description of Unknown: uncultivated organism sequence
  misc_feature 1..36: note = Category: MG61 effectors repeat
  misc_feature 1..36: note = Description: MG61-4 effector repeat
  source 1..36: mol_type = unassigned DNA
agttataaggaacaataaatgcctgctgctgcaggc

SEQ ID NO: 3753 - DNA, 36 bp, unidentified; identical to SEQ ID NO: 3752
  misc_feature 1..36: note = Description of Unknown: uncultivated organism sequence
  misc_feature 1..36: note = Category: MG61 effectors repeat
  misc_feature 1..36: note = Description: MG61-4 effector repeat
  source 1..36: mol_type = unassigned DNA

SEQ ID NO: 3754 - DNA, 36 bp, unidentified; identical to SEQ ID NO: 3752
  misc_feature 1..36: note = Description of Unknown: uncultivated organism sequence
  misc_feature 1..36: note = Category: MG61 effectors repeat
  misc_feature 1..36: note = Description: MG61-4 effector repeat
  source 1..36: mol_type = unassigned DNA

SEQ ID NO: 3755 - DNA, 36 bp, unidentified; identical to SEQ ID NO: 3752
  misc_feature 1..36: note = Description of Unknown: uncultivated organism sequence
  misc_feature 1..36: note = Category: MG61 effectors repeat
  misc_feature 1..36: note = Description: MG61-4 effector repeat
  source 1..36: mol_type = unassigned DNA

SEQ ID NO: 3756 - DNA, 36 bp, unidentified; identical to SEQ ID NO: 3752
  misc_feature 1..36: note = Description of Unknown: uncultivated organism sequence
  misc_feature 1..36: note = Category: MG61 effectors repeat
  misc_feature 1..36: note = Description: MG61-4 effector repeat
  source 1..36: mol_type = unassigned DNA

SEQ ID NO: 3757 - DNA, 36 bp, unidentified; identical to SEQ ID NO: 3752
  misc_feature 1..36: note = Description of Unknown: uncultivated organism sequence
  misc_feature 1..36: note = Category: MG61 effectors repeat
  misc_feature 1..36: note = Description: MG61-4 effector repeat
  source 1..36: mol_type = unassigned DNA

SEQ ID NO: 3758 - DNA, 36 bp, unidentified; identical to SEQ ID NO: 3752
  misc_feature 1..36: note = Description of Unknown: uncultivated organism sequence
  misc_feature 1..36: note = Category: MG61 effectors repeat
  misc_feature 1..36: note = Description: MG61-4 effector repeat
  source 1..36: mol_type = unassigned DNA

SEQ ID NO: 3759 - DNA, 36 bp, unidentified; identical to SEQ ID NO: 3752
  misc_feature 1..36: note = Description of Unknown: uncultivated organism sequence
  misc_feature 1..36: note = Category: MG61 effectors repeat
  misc_feature 1..36: note = Description: MG61-4 effector repeat
  source 1..36: mol_type = unassigned DNA

SEQ ID NO: 3760 - DNA, 36 bp, unidentified; identical to SEQ ID NO: 3752
  misc_feature 1..36: note = Description of Unknown: uncultivated organism sequence
  misc_feature 1..36: note = Category: MG61 effectors repeat
  misc_feature 1..36: note = Description: MG61-4, MG61-7, MG61-8, MG61-9, MG61-10, MG61-11, MG61-13, MG61-14, MG61-15 effectors repeat
  source 1..36: mol_type = unassigned DNA

SEQ ID NO: 3761 - DNA, 36 bp, unidentified
  misc_feature 1..36: note = Description of Unknown: uncultivated organism sequence
  misc_feature 1..36: note = Category: MG61 effectors repeat
  misc_feature 1..36: note = Description: MG61-5 effector repeat
  source 1..36: mol_type = unassigned DNA
gttaaaaggatcaaataaatacctgctgttgcaggc

SEQ ID NO: 3762 - DNA, 36 bp, unidentified; identical to SEQ ID NO: 3761
  misc_feature 1..36: note = Description of Unknown: uncultivated organism sequence
  misc_feature 1..36: note = Category: MG61 effectors repeat
  misc_feature 1..36: note = Description: MG61-5 effector repeat
  source 1..36: mol_type = unassigned DNA

SEQ ID NO: 3763 - DNA, 36 bp, unidentified; identical to SEQ ID NO: 3761
  misc_feature 1..36: note = Description of Unknown: uncultivated organism sequence
  misc_feature 1..36: note = Category: MG61 effectors repeat
  misc_feature 1..36: note = Description: MG61-5 effector repeat
  source 1..36: mol_type = unassigned DNA

SEQ ID NO: 3764 - DNA, 36 bp, unidentified; identical to SEQ ID NO: 3761
  misc_feature 1..36: note = Description of Unknown: uncultivated organism sequence
  misc_feature 1..36: note = Category: MG61 effectors repeat
  misc_feature 1..36: note = Description: MG61-5 effector repeat
  source 1..36: mol_type = unassigned DNA

SEQ ID NO: 3765 - DNA, 36 bp, unidentified; identical to SEQ ID NO: 3761
  misc_feature 1..36: note = Description of Unknown: uncultivated organism sequence
  misc_feature 1..36: note = Category: MG61 effectors repeat
  misc_feature 1..36: note = Description: MG61-5, MG61-6, MG61-16 effectors repeat
  source 1..36: mol_type = unassigned DNA

SEQ ID NO: 3766 - DNA, 36 bp, unidentified; identical to SEQ ID NO: 3761
  misc_feature 1..36: note = Description of Unknown: uncultivated organism sequence
  misc_feature 1..36: note = Category: MG61 effectors repeat
  misc_feature 1..36: note = Description: MG61-6 effector repeat
  source 1..36: mol_type = unassigned DNA

SEQ ID NO: 3767 - DNA, 36 bp, unidentified; identical to SEQ ID NO: 3761
  misc_feature 1..36: note = Description of Unknown: uncultivated organism sequence
  misc_feature 1..36: note = Category: MG61 effectors repeat
  misc_feature 1..36: note = Description: MG61-6 effector repeat
  source 1..36: mol_type = unassigned DNA

SEQ ID NO: 3768 - DNA, 36 bp, unidentified; identical to SEQ ID NO: 3761
  misc_feature 1..36: note = Description of Unknown: uncultivated organism sequence
  misc_feature 1..36: note = Category: MG61 effectors repeat
  misc_feature 1..36: note = Description: MG61-6 effector repeat
  source 1..36: mol_type = unassigned DNA

SEQ ID NO: 3769 - DNA, 36 bp, unidentified; identical to SEQ ID NO: 3761
  misc_feature 1..36: note = Description of Unknown: uncultivated organism sequence
  misc_feature 1..36: note = Category: MG61 effectors repeat
  misc_feature 1..36: note = Description: MG61-6 effector repeat
  source 1..36: mol_type = unassigned DNA

SEQ ID NO: 3770 - DNA, 36 bp, unidentified; identical to SEQ ID NO: 3752
  misc_feature 1..36: note = Description of Unknown: uncultivated organism sequence
  misc_feature 1..36: note = Category: MG61 effectors repeat
  misc_feature 1..36: note = Description: MG61-7 effector repeat
  source 1..36: mol_type = unassigned DNA

SEQ ID NO: 3771 - DNA, 36 bp, unidentified; identical to SEQ ID NO: 3752
  misc_feature 1..36: note = Description of Unknown: uncultivated organism sequence
  misc_feature 1..36: note = Category: MG61 effectors repeat
  misc_feature 1..36: note = Description: MG61-7 effector repeat
  source 1..36: mol_type = unassigned DNA

SEQ ID NO: 3772 - DNA, 36 bp, unidentified; identical to SEQ ID NO: 3752
  misc_feature 1..36: note = Description of Unknown: uncultivated organism sequence
  misc_feature 1..36: note = Category: MG61 effectors repeat
  misc_feature 1..36: note = Description: MG61-7 effector repeat
  source 1..36: mol_type = unassigned DNA

SEQ ID NO: 3773 - DNA, 36 bp, unidentified; identical to SEQ ID NO: 3752
  misc_feature 1..36: note = Description of Unknown: uncultivated organism sequence
  misc_feature 1..36: note = Category: MG61 effectors repeat
  misc_feature 1..36: note = Description: MG61-7 effector repeat
  source 1..36: mol_type = unassigned DNA

SEQ ID NO: 3774 - DNA, 36 bp, unidentified; identical to SEQ ID NO: 3752
  misc_feature 1..36: note = Description of Unknown: uncultivated organism sequence
  misc_feature 1..36: note = Category: MG61 effectors repeat
  misc_feature 1..36: note = Description: MG61-7 effector repeat
  source 1..36: mol_type = unassigned DNA

SEQ ID NO: 3775 - DNA, 36 bp, unidentified; identical to SEQ ID NO: 3752
  misc_feature 1..36: note = Description of Unknown: uncultivated organism sequence
  misc_feature 1..36: note = Category: MG61 effectors repeat
  misc_feature 1..36: note = Description: MG61-7 effector repeat
  source 1..36: mol_type = unassigned DNA

SEQ ID NO: 3776 - DNA, 36 bp, unidentified; identical to SEQ ID NO: 3752
  misc_feature 1..36: note = Description of Unknown: uncultivated organism sequence
  misc_feature 1..36: note = Category: MG61 effectors repeat
  misc_feature 1..36: note = Description: MG61-7 effector repeat
  source 1..36: mol_type = unassigned DNA

SEQ ID NO: 3777 - DNA, 36 bp, unidentified; identical to SEQ ID NO: 3752
  misc_feature 1..36: note = Description of Unknown: uncultivated organism sequence
  misc_feature 1..36: note = Category: MG61 effectors repeat
  misc_feature 1..36: note = Description: MG61-7 effector repeat
  source 1..36: mol_type = unassigned DNA

SEQ ID NO: 3778 - DNA, 36 bp, unidentified; identical to SEQ ID NO: 3752
  misc_feature 1..36: note = Description of Unknown: uncultivated organism sequence
  misc_feature 1..36: note = Category: MG61 effectors repeat
  misc_feature 1..36: note = Description: MG61-8 effector repeat
  source 1..36: mol_type = unassigned DNA

SEQ ID NO: 3779 - DNA, 36 bp, unidentified; identical to SEQ ID NO: 3752
  misc_feature 1..36: note = Description of Unknown: uncultivated organism sequence
  misc_feature 1..36: note = Category: MG61 effectors repeat
  misc_feature 1..36: note = Description: MG61-8 effector repeat
  source 1..36: mol_type = unassigned DNA

SEQ ID NO: 3780 - DNA, 36 bp, unidentified; identical to SEQ ID NO: 3752
  misc_feature 1..36: note = Description of Unknown: uncultivated organism sequence
  misc_feature 1..36: note = Category: MG61 effectors repeat
  misc_feature 1..36: note = Description: MG61-8 effector repeat
  source 1..36: mol_type = unassigned DNA

SEQ ID NO: 3781 - DNA, 36 bp, unidentified; identical to SEQ ID NO: 3752
  misc_feature 1..36: note = Description of Unknown: uncultivated organism sequence
  misc_feature 1..36: note = Category: MG61 effectors repeat
  misc_feature 1..36: note = Description: MG61-8 effector repeat
  source 1..36: mol_type = unassigned DNA

SEQ ID NO: 3782 - DNA, 36 bp, unidentified; identical to SEQ ID NO: 3752
  misc_feature 1..36: note = Description of Unknown: uncultivated organism sequence
  misc_feature 1..36: note = Category: MG61 effectors repeat
  misc_feature 1..36: note = Description: MG61-8 effector repeat
  source 1..36: mol_type = unassigned DNA

SEQ ID NO: 3783 - DNA, 36 bp, unidentified; identical to SEQ ID NO: 3752
  misc_feature 1..36: note = Description of Unknown: uncultivated organism sequence
  misc_feature 1..36: note = Category: MG61 effectors repeat
  misc_feature 1..36: note = Description: MG61-8 effector repeat
  source 1..36: mol_type = unassigned DNA

SEQ ID NO: 3784 - DNA, 36 bp, unidentified; identical to SEQ ID NO: 3752
  misc_feature 1..36: note = Description of Unknown: uncultivated organism sequence
  misc_feature 1..36: note = Category: MG61 effectors repeat
  misc_feature 1..36: note = Description: MG61-8 effector repeat
  source 1..36: mol_type = unassigned DNA

SEQ ID NO: 3785 - DNA, 36 bp, unidentified; identical to SEQ ID NO: 3752
  misc_feature 1..36: note = Description of Unknown: uncultivated organism sequence
  misc_feature 1..36: note = Category: MG61 effectors repeat
  misc_feature 1..36: note = Description: MG61-8 effector repeat
  source 1..36: mol_type = unassigned DNA

SEQ ID NO: 3786 - DNA, 36 bp, unidentified; identical to SEQ ID NO: 3752
  misc_feature 1..36: note = Description of Unknown: uncultivated organism sequence
  misc_feature 1..36: note = Category: MG61 effectors repeat
  misc_feature 1..36: note = Description: MG61-9 effector repeat
  source 1..36: mol_type = unassigned DNA

SEQ ID NO: 3787 - DNA, 36 bp, unidentified; identical to SEQ ID NO: 3752
  misc_feature 1..36: note = Description of Unknown: uncultivated organism sequence
  misc_feature 1..36: note = Category: MG61 effectors repeat
  misc_feature 1..36: note = Description: MG61-9 effector repeat
  source 1..36: mol_type = unassigned DNA

SEQ ID NO: 3788 - DNA, 36 bp, unidentified; identical to SEQ ID NO: 3752
  misc_feature 1..36: note = Description of Unknown: uncultivated organism sequence
  misc_feature 1..36: note = Category: MG61 effectors repeat
  misc_feature 1..36: note = Description: MG61-9 effector repeat
  source 1..36: mol_type = unassigned DNA

SEQ ID NO: 3789 - DNA, 36 bp, unidentified; identical to SEQ ID NO: 3752
  misc_feature 1..36: note = Description of Unknown: uncultivated organism sequence
  misc_feature 1..36: note = Category: MG61 effectors repeat
  misc_feature 1..36: note = Description: MG61-9 effector repeat
  source 1..36: mol_type = unassigned DNA

SEQ ID NO: 3790 - DNA, 36 bp, unidentified; identical to SEQ ID NO: 3752
  misc_feature 1..36: note = Description of Unknown: uncultivated organism sequence
  misc_feature 1..36: note = Category: MG61 effectors repeat
  misc_feature 1..36: note = Description: MG61-9 effector repeat
  source 1..36: mol_type = unassigned DNA

SEQ ID NO: 3791 - DNA, 36 bp, unidentified; identical to SEQ ID NO: 3752
  misc_feature 1..36: note = Description of Unknown: uncultivated organism sequence
  misc_feature 1..36: note = Category: MG61 effectors repeat
  misc_feature 1..36: note = Description: MG61-9 effector repeat
  source 1..36: mol_type = unassigned DNA

SEQ ID NO: 3792 - DNA, 36 bp, unidentified; identical to SEQ ID NO: 3752
  misc_feature 1..36: note = Description of Unknown: uncultivated organism sequence
  misc_feature 1..36: note = Category: MG61 effectors repeat
  misc_feature 1..36: note = Description: MG61-10 effector repeat
  source 1..36: mol_type = unassigned DNA

SEQ ID NO: 3793 - DNA, 36 bp, unidentified; identical to SEQ ID NO: 3752
  misc_feature 1..36: note = Description of Unknown: uncultivated organism sequence
  misc_feature 1..36: note = Category: MG61 effectors repeat
  misc_feature 1..36: note = Description: MG61-10 effector repeat
  source 1..36: mol_type = unassigned DNA

SEQ ID NO: 3794 - DNA, 36 bp, unidentified; identical to SEQ ID NO: 3752
  misc_feature 1..36: note = Description of Unknown: uncultivated organism sequence
  misc_feature 1..36: note = Category: MG61 effectors repeat
  misc_feature 1..36: note = Description: MG61-10 effector repeat
  source 1..36: mol_type = unassigned DNA

SEQ ID NO: 3795 - DNA, 36 bp, unidentified; identical to SEQ ID NO: 3752
  misc_feature 1..36: note = Description of Unknown: uncultivated organism sequence
  misc_feature 1..36: note = Category: MG61 effectors repeat
  misc_feature 1..36: note = Description: MG61-10 effector repeat
  source 1..36: mol_type = unassigned DNA

SEQ ID NO: 3796 - DNA, 36 bp, unidentified; identical to SEQ ID NO: 3752
  misc_feature 1..36: note = Description of Unknown: uncultivated organism sequence
  misc_feature 1..36: note = Category: MG61 effectors repeat
  misc_feature 1..36: note = Description: MG61-10 effector repeat
  source 1..36: mol_type = unassigned DNA

SEQ ID NO: 3797 - DNA, 36 bp, unidentified; identical to SEQ ID NO: 3752
  misc_feature 1..36: note = Description of Unknown: uncultivated organism sequence
  misc_feature 1..36: note = Category: MG61 effectors repeat
  misc_feature 1..36: note = Description: MG61-10 effector repeat
  source 1..36: mol_type = unassigned DNA

SEQ ID NO: 3798 - DNA, 36 bp, unidentified; identical to SEQ ID NO: 3752
  misc_feature 1..36: note = Description of Unknown: uncultivated organism sequence
  misc_feature 1..36: note = Category: MG61 effectors repeat
  misc_feature 1..36: note = Description: MG61-10 effector repeat
  source 1..36: mol_type = unassigned DNA

SEQ ID NO: 3799 - DNA, 36 bp, unidentified; identical to SEQ ID NO: 3752
  misc_feature 1..36: note = Description of Unknown: uncultivated organism sequence
  misc_feature 1..36: note = Category: MG61 effectors repeat
  misc_feature 1..36: note = Description: MG61-11 effector repeat
  source 1..36: mol_type = unassigned DNA

SEQ ID NO: 3800 - DNA, 36 bp, unidentified; identical to SEQ ID NO: 3752
  misc_feature 1..36: note = Description of Unknown: uncultivated organism sequence
  misc_feature 1..36: note = Category: MG61 effectors repeat
  misc_feature 1..36: note = Description: MG61-11 effector repeat
  source 1..36: mol_type = unassigned DNA

SEQ ID NO: 3801 - DNA, 36 bp, unidentified; identical to SEQ ID NO: 3752
  misc_feature 1..36: note = Description of Unknown: uncultivated organism sequence
  misc_feature 1..36: note = Category: MG61 effectors repeat
  misc_feature 1..36: note = Description: MG61-11 effector repeat
  source 1..36: mol_type = unassigned DNA

SEQ ID NO: 3802 - DNA, 36 bp, unidentified; identical to SEQ ID NO: 3752
  misc_feature 1..36: note = Description of Unknown: uncultivated organism sequence
  misc_feature 1..36: note = Category: MG61 effectors repeat
  misc_feature 1..36: note = Description: MG61-11 effector repeat
  source 1..36: mol_type = unassigned DNA

SEQ ID NO: 3803 - DNA, 36 bp, unidentified; identical to SEQ ID NO: 3752
  misc_feature 1..36: note = Description of Unknown: uncultivated organism sequence
  misc_feature 1..36: note = Category: MG61 effectors repeat
  misc_feature 1..36: note = Description: MG61-11 effector repeat
  source 1..36: mol_type = unassigned DNA

SEQ ID NO: 3804 - DNA, 36 bp, unidentified; identical to SEQ ID NO: 3752
  misc_feature 1..36: note = Description of Unknown: uncultivated organism sequence
  misc_feature 1..36: note = Category: MG61 effectors repeat
  misc_feature 1..36: note = Description: MG61-11 effector repeat
  source 1..36: mol_type = unassigned DNA

SEQ ID NO: 3805 - DNA, 36 bp, unidentified; identical to SEQ ID NO: 3752
  misc_feature 1..36: note = Description of Unknown: uncultivated organism sequence
  misc_feature 1..36: note = Category: MG61 effectors repeat
  misc_feature 1..36: note = Description: MG61-11 effector repeat
  source 1..36: mol_type = unassigned DNA

SEQ ID NO: 3806 - DNA, 35 bp, unidentified; identical to SEQ ID NO: 3746
  misc_feature 1..35: note = Description of Unknown: uncultivated organism sequence
  misc_feature 1..35: note = Category: MG61 effectors repeat
  misc_feature 1..35: note = Description: MG61-12 effector repeat
  source 1..35: mol_type = unassigned DNA

SEQ ID NO: 3807 - DNA, 35 bp, unidentified; identical to SEQ ID NO: 3746
  misc_feature 1..35: note = Description of Unknown: uncultivated organism sequence
  misc_feature 1..35: note = Category: MG61 effectors repeat
  misc_feature 1..35: note = Description: MG61-12 effector repeat
  source 1..35: mol_type = unassigned DNA

SEQ ID NO: 3808 - DNA, 35 bp, unidentified; identical to SEQ ID NO: 3746
  misc_feature 1..35: note = Description of Unknown: uncultivated organism sequence
  misc_feature 1..35: note = Category: MG61 effectors repeat
  misc_feature 1..35: note = Description: MG61-12 effector repeat
  source 1..35: mol_type = unassigned DNA

SEQ ID NO: 3809 - DNA, 35 bp, unidentified; identical to SEQ ID NO: 3746
  misc_feature 1..35: note = Description of Unknown: uncultivated organism sequence
  misc_feature 1..35: note = Category: MG61 effectors repeat
  misc_feature 1..35: note = Description: MG61-12 effector repeat
  source 1..35: mol_type = unassigned DNA

SEQ ID NO: 3810 - DNA, 35 bp, unidentified; identical to SEQ ID NO: 3746
  misc_feature 1..35: note = Description of Unknown: uncultivated organism sequence
  misc_feature 1..35: note = Category: MG61 effectors repeat
  misc_feature 1..35: note = Description: MG61-12 effector repeat
  source 1..35: mol_type = unassigned DNA

SEQ ID NO: 3811 - DNA, 36 bp, unidentified; identical to SEQ ID NO: 3752
  misc_feature 1..36: note = Description of Unknown: uncultivated organism sequence
  misc_feature 1..36: note = Category: MG61 effectors repeat
  misc_feature 1..36: note = Description: MG61-13 effector repeat
  source 1..36: mol_type = unassigned DNA

SEQ ID NO: 3812 - DNA, 36 bp, unidentified; identical to SEQ ID NO: 3752
  misc_feature 1..36: note = Description of Unknown: uncultivated organism sequence
  misc_feature 1..36: note = Category: MG61 effectors repeat
  misc_feature 1..36: note = Description: MG61-13 effector repeat
  source 1..36: mol_type = unassigned DNA

SEQ ID NO: 3813 - DNA, 36 bp, unidentified; identical to SEQ ID NO: 3752
  misc_feature 1..36: note = Description of Unknown: uncultivated organism sequence
  misc_feature 1..36: note = Category: MG61 effectors repeat
  misc_feature 1..36: note = Description: MG61-13 effector repeat
  source 1..36: mol_type = unassigned DNA

SEQ ID NO: 3814 - DNA, 36 bp, unidentified; identical to SEQ ID NO: 3752
  misc_feature 1..36: note = Description of Unknown: uncultivated organism sequence
  misc_feature 1..36: note = Category: MG61 effectors repeat
  misc_feature 1..36: note = Description: MG61-13 effector repeat
  source 1..36: mol_type = unassigned DNA

SEQ ID NO: 3815 - DNA, 36 bp, unidentified; identical to SEQ ID NO: 3752
  misc_feature 1..36: note = Description of Unknown: uncultivated organism sequence
  misc_feature 1..36: note = Category: MG61 effectors repeat
  misc_feature 1..36: note = Description: MG61-13 effector repeat
  source 1..36: mol_type = unassigned DNA

SEQ ID NO: 3816 - DNA, 36 bp, unidentified; identical to SEQ ID NO: 3752
  misc_feature 1..36: note = Description of Unknown: uncultivated organism sequence
  misc_feature 1..36: note = Category: MG61 effectors repeat
  misc_feature 1..36: note = Description: MG61-13 effector repeat
  source 1..36: mol_type = unassigned DNA

SEQ ID NO: 3817 - DNA, 36 bp, unidentified; identical to SEQ ID NO: 3752
  misc_feature 1..36: note = Description of Unknown: uncultivated organism sequence
  misc_feature 1..36: note = Category: MG61 effectors repeat
  misc_feature 1..36: note = Description: MG61-13 effector repeat
  source 1..36: mol_type = unassigned DNA

SEQ ID NO: 3818 - DNA, 36 bp, unidentified; identical to SEQ ID NO: 3752
  misc_feature 1..36: note = Description of Unknown: uncultivated organism sequence
  misc_feature 1..36: note = Category: MG61 effectors repeat
  misc_feature 1..36: note = Description: MG61-13 effector repeat
  source 1..36: mol_type = unassigned DNA

SEQ ID NO: 3819 - DNA, 36 bp, unidentified; identical to SEQ ID NO: 3752
  misc_feature 1..36: note = Description of Unknown: uncultivated organism sequence
  misc_feature 1..36: note = Category: MG61 effectors repeat
  misc_feature 1..36: note = Description: MG61-14 effector repeat
  source 1..36: mol_type = unassigned DNA

SEQ ID NO: 3820 - DNA, 36 bp, unidentified; identical to SEQ ID NO: 3752
  misc_feature 1..36: note = Description of Unknown: uncultivated organism sequence
  misc_feature 1..36: note = Category: MG61 effectors repeat
  misc_feature 1..36: note = Description: MG61-14 effector repeat
  source 1..36: mol_type = unassigned DNA

SEQ ID NO: 3821 - DNA, 36 bp, unidentified; identical to SEQ ID NO: 3752
  misc_feature 1..36: note = Description of Unknown: uncultivated organism sequence
  misc_feature 1..36: note = Category: MG61 effectors repeat
  misc_feature 1..36: note = Description: MG61-14 effector repeat
  source 1..36: mol_type = unassigned DNA

SEQ ID NO: 3822 - DNA, 36 bp, unidentified; identical to SEQ ID NO: 3752
  misc_feature 1..36: note = Description of Unknown: uncultivated organism sequence
  misc_feature 1..36: note = Category: MG61 effectors repeat
  misc_feature 1..36: note = Description: MG61-14 effector repeat
  source 1..36: mol_type = unassigned DNA

SEQ ID NO: 3823 - DNA, 36 bp, unidentified; identical to SEQ ID NO: 3752
  misc_feature 1..36: note = Description of Unknown: uncultivated organism sequence
  misc_feature 1..36: note = Category: MG61 effectors repeat
  misc_feature 1..36: note = Description: MG61-14 effector repeat
  source 1..36: mol_type = unassigned DNA

SEQ ID NO: 3824 - DNA, 36 bp, unidentified; identical to SEQ ID NO: 3752
  misc_feature 1..36: note = Description of Unknown: uncultivated organism sequence
  misc_feature 1..36: note = Category: MG61 effectors repeat
  misc_feature 1..36: note = Description: MG61-14 effector repeat
  source 1..36: mol_type = unassigned DNA

SEQ ID NO: 3825 - DNA, 36 bp, unidentified; identical to SEQ ID NO: 3752
  misc_feature 1..36: note = Description of Unknown: uncultivated organism sequence
  misc_feature 1..36: note = Category: MG61 effectors repeat
  misc_feature 1..36: note = Description: MG61-15 effector repeat
  source 1..36: mol_type = unassigned DNA

SEQ ID NO: 3826 - DNA, 36 bp, unidentified; identical to SEQ ID NO: 3752
  misc_feature 1..36: note = Description of Unknown: uncultivated organism sequence
  misc_feature 1..36: note = Category: MG61 effectors repeat
  misc_feature 1..36: note = Description: MG61-15 effector repeat
  source 1..36: mol_type = unassigned DNA

SEQ ID NO: 3827 - DNA, 36 bp, unidentified; identical to SEQ ID NO: 3752
  misc_feature 1..36: note = Description of Unknown: uncultivated organism sequence
  misc_feature 1..36: note = Category: MG61 effectors repeat
  misc_feature 1..36: note = Description: MG61-15 effector repeat
  source 1..36: mol_type = unassigned DNA

SEQ ID NO: 3828 - DNA, 36 bp, unidentified; identical to SEQ ID NO: 3752
  misc_feature 1..36: note = Description of Unknown: uncultivated organism sequence
  misc_feature 1..36: note = Category: MG61 effectors repeat
  misc_feature 1..36: note = Description: MG61-15 effector repeat
  source 1..36: mol_type = unassigned DNA

SEQ ID NO: 3829 - DNA, 36 bp, unidentified; identical to SEQ ID NO: 3752
  misc_feature 1..36: note = Description of Unknown: uncultivated organism sequence
  misc_feature 1..36: note = Category: MG61 effectors repeat
  misc_feature 1..36: note = Description: MG61-15 effector repeat
  source 1..36: mol_type = unassigned DNA

SEQ ID NO: 3830 - DNA, 36 bp, unidentified; identical to SEQ ID NO: 3752
  misc_feature 1..36: note = Description of Unknown: uncultivated organism sequence
  misc_feature 1..36: note = Category: MG61 effectors repeat
  misc_feature 1..36: note = Description: MG61-15 effector repeat
  source 1..36: mol_type = unassigned DNA

SEQ ID NO: 3831 - DNA, 36 bp, unidentified; identical to SEQ ID NO: 3761
  misc_feature 1..36: note = Description of Unknown: uncultivated organism sequence
  misc_feature 1..36: note = Category: MG61 effectors repeat
  misc_feature 1..36: note = Description: MG61-16 effector repeat
  source 1..36: mol_type = unassigned DNA

SEQ ID NO: 3832 - DNA, 36 bp, unidentified; identical to SEQ ID NO: 3761
  misc_feature 1..36: note = Description of Unknown: uncultivated organism sequence
  misc_feature 1..36: note = Category: MG61 effectors repeat
  misc_feature 1..36: note = Description: MG61-16 effector repeat
  source 1..36: mol_type = unassigned DNA

SEQ ID NO: 3833 - DNA, 36 bp, unidentified; identical to SEQ ID NO: 3761
  misc_feature 1..36: note = Description of Unknown: uncultivated organism sequence
  misc_feature 1..36: note = Category: MG61 effectors repeat
  misc_feature 1..36: note = Description: MG61-16 effector repeat
  source 1..36: mol_type = unassigned DNA

SEQ ID NO: 3834 - DNA, 36 bp, unidentified; identical to SEQ ID NO: 3761
  misc_feature 1..36: note = Description of Unknown: uncultivated organism sequence
  misc_feature 1..36: note = Category: MG61 effectors repeat
  misc_feature 1..36: note = Description: MG61-16 effector repeat
  source 1..36: mol_type = unassigned DNA

SEQ ID NO: 3835 - DNA, 36 bp, unidentified; identical to SEQ ID NO: 3761
  misc_feature 1..36: note = Description of Unknown: uncultivated organism sequence
  misc_feature 1..36: note = Category: MG61 effectors repeat
  misc_feature 1..36: note = Description: MG61-16 effector repeat
  source 1..36: mol_type = unassigned DNA

SEQ ID NO: 3836 - DNA, 36 bp, unidentified; identical to SEQ ID NO: 3761
  misc_feature 1..36: note = Description of Unknown: uncultivated organism sequence
  misc_feature 1..36: note = Category: MG61 effectors repeat
  misc_feature 1..36: note = Description: MG61-16 effector repeat
  source 1..36: mol_type = unassigned DNA

SEQ ID NO: 3837 - DNA, 36 bp, unidentified; identical to SEQ ID NO: 3761
  misc_feature 1..36: note = Description of Unknown: uncultivated organism sequence
  misc_feature 1..36: note = Category: MG61 effectors repeat
  misc_feature 1..36: note = Description: MG61-16 effector repeat
  source 1..36: mol_type = unassigned DNA

SEQ ID NO: 3838 - DNA, 36 bp, unidentified; identical to SEQ ID NO: 3761
  misc_feature 1..36: note = Description of Unknown: uncultivated organism sequence
  misc_feature 1..36: note = Category: MG61 effectors repeat
  misc_feature 1..36: note = Description: MG61-16 effector repeat
  source 1..36: mol_type = unassigned DNA

SEQ ID NO: 3839 - DNA, 36 bp, unidentified; identical to SEQ ID NO: 3761
  misc_feature 1..36: note = Description of Unknown: uncultivated organism sequence
  misc_feature 1..36: note = Category: MG61 effectors repeat
  misc_feature 1..36: note = Description: MG61-16 effector repeat
  source 1..36: mol_type = unassigned DNA

SEQ ID NO: 3840 - DNA, 36 bp, unidentified; identical to SEQ ID NO: 3761
  misc_feature 1..36: note = Description of Unknown: uncultivated organism sequence
  misc_feature 1..36: note = Category: MG61 effectors repeat
  misc_feature 1..36: note = Description: MG61-16 effector repeat
  source 1..36: mol_type = unassigned DNA

SEQ ID NO: 3841 - DNA, 36 bp, unidentified; identical to SEQ ID NO: 3761
  misc_feature 1..36: note = Description of Unknown: uncultivated organism sequence
  misc_feature 1..36: note = Category: MG61 effectors repeat
  misc_feature 1..36: note = Description: MG61-16 effector repeat
  source 1..36: mol_type = unassigned DNA

SEQ ID NO: 3842 - DNA, 36 bp, unidentified
  misc_feature 1..36: note = Description of Unknown: uncultivated organism sequence
  misc_feature 1..36: note = Category: MG61 effectors repeat
  misc_feature 1..36: note = Description: MG61-17 effector repeat
  source 1..36: mol_type = unassigned DNA
ggttataaggaagcaataaatgcctgctgatgcagg

SEQ ID NO: 3843 - DNA, 36 bp, unidentified; identical to SEQ ID NO: 3842
  misc_feature 1..36: note = Description of Unknown: uncultivated organism sequence
  misc_feature 1..36: note = Category: MG61 effectors repeat
  misc_feature 1..36: note = Description: MG61-17 effector repeat
  source 1..36: mol_type = unassigned DNA

SEQ ID NO: 3844 - DNA, 36 bp, unidentified; identical to SEQ ID NO: 3842
  misc_feature 1..36: note = Description of Unknown: uncultivated organism sequence
  misc_feature 1..36: note = Category: MG61 effectors repeat
  misc_feature 1..36: note = Description: MG61-17 effector repeat
  source 1..36: mol_type = unassigned DNA

SEQ ID NO: 3845 - DNA, 36 bp, unidentified; identical to SEQ ID NO: 3842
  misc_feature 1..36: note = Description of Unknown: uncultivated organism sequence
  misc_feature 1..36: note = Category: MG61 effectors repeat
  misc_feature 1..36: note = Description: MG61-17 effector repeat
  source 1..36: mol_type = unassigned DNA

SEQ ID NO: 3846 - DNA, 36 bp, unidentified; identical to SEQ ID NO: 3842
  misc_feature 1..36: note = Description of Unknown: uncultivated organism sequence
  misc_feature 1..36: note = Category: MG61 effectors repeat
  misc_feature 1..36: note = Description: MG61-17 effector repeat
  source 1..36: mol_type = unassigned DNA

SEQ ID NO: 3847 - DNA, 36 bp, unidentified; identical to SEQ ID NO: 3842
  misc_feature 1..36: note = Description of Unknown: uncultivated organism sequence
  misc_feature 1..36: note = Category: MG61 effectors repeat
  misc_feature 1..36: note = Description: MG61-17 effector repeat
  source 1..36: mol_type = unassigned DNA

SEQ ID NO: 3848 - DNA, 35 bp, unidentified
  misc_feature 1..35: note = Description of Unknown: uncultivated organism sequence
  misc_feature 1..35: note = Category: MG62 effectors repeat
  misc_feature 1..35: note = Description: MG62-2 effector repeat
  source 1..35: mol_type = unassigned DNA
tttaaacatagtatctaatttctacttttgtagat

SEQ ID NO: 3849 - DNA, 37 bp, unidentified
  misc_feature 1..37: note = Description of Unknown: uncultivated organism sequence
  misc_feature 1..37: note = Category: MG62 effectors repeat
  misc_feature 1..37: note = Description: MG62-3 effector repeat
  source 1..37: mol_type = unassigned DNA
gtttaaacatagtatctaatttctactttggtagata

SEQ ID NO: 3850 - DNA, 37 bp, unidentified
  misc_feature 1..37: note = Description of Unknown: uncultivated organism sequence
  misc_feature 1..37: note = Category: MG62 effectors repeat
  misc_feature 1..37: note = Description: MG62-3 effector repeat
  source 1..37: mol_type = unassigned DNA
gtttaaacatagtatctaatttctactttggtagatt

SEQ ID NO: 3851 - DNA, 43 bp, unidentified
  misc_feature 1..43: note = Description of Unknown: uncultivated organism sequence
  misc_feature 1..43: note = Category: MG77 guide RNA
  misc_feature 1..43: note = Description: MG77-1 sgRNA
  misc_difference 20..43: note = modified_base - a, c, t, g, unknown or other
  misc_difference 20..43: note = misc_feature - This region may encompass 20 or 24 nucleotides
  source 1..43: mol_type = unassigned DNA
aatttctactctggtagatnnnnnnnnnnnnnnnnnnnnnnnn

SEQ ID NO: 3852 - DNA, 43 bp, unidentified
  misc_feature 1..43: note = Description of Unknown: uncultivated organism sequence
  misc_feature 1..43: note = Category: MG77 guide RNA
  misc_feature 1..43: note = Description: MG77-2 sgRNA
  misc_difference 20..43: note = modified_base - a, c, t, g, unknown or other
  misc_difference 20..43: note = misc_feature - This region may encompass 20 or 24 nucleotides
  source 1..43: mol_type = unassigned DNA
aatttctacttgtgtagatnnnnnnnnnnnnnnnnnnnnnnnn

SEQ ID NO: 3853 - DNA, 43 bp, unidentified; identical to SEQ ID NO: 3730
  misc_feature 1..43: note = Description of Unknown: uncultivated organism sequence
  misc_feature 1..43: note = Category: MG78 guide RNA
  misc_feature 1..43: note = Description: MG78-1 sgRNA
  misc_difference 20..43: note = modified_base - a, c, t, g, unknown or other
  misc_difference 20..43: note = misc_feature - This region may encompass 20 or 24 nucleotides
  source 1..43: mol_type = unassigned DNA

SEQ ID NO: 3854 - DNA, 43 bp, unidentified
  misc_feature 1..43: note = Description of Unknown: uncultivated organism sequence
  misc_feature 1..43: note = Category: MG79 guide RNA
  misc_feature 1..43: note = Description: MG79-1 sgRNA
  misc_difference 20..43: note = modified_base - a, c, t, g, unknown or other
  misc_difference 20..43: note = misc_feature - This region may encompass 20 or 24 nucleotides
  source 1..43: mol_type = unassigned DNA
aatttctactaatgtagatnnnnnnnnnnnnnnnnnnnnnnnn

SEQ ID NO: 3855 - DNA, 43 bp, unidentified
  misc_feature 1..43: note = Description of Unknown: uncultivated organism sequence
  misc_feature 1..43: note = Category: MG79 guide RNA
  misc_feature 1..43: note = Description: MG79-2 sgRNA
  misc_difference 20..43: note = modified_base - a, c, t, g, unknown or other
  misc_difference 20..43: note = misc_feature - This region may encompass 20 or 24 nucleotides
  source 1..43: mol_type = unassigned DNA
aatttctactattgtagatnnnnnnnnnnnnnnnnnnnnnnnn

SEQ ID NO: 3856 - DNA, 43 bp, unidentified; identical to SEQ ID NO: 3695
  misc_feature 1..43: note = Description of Unknown: uncultivated organism sequence
  misc_feature 1..43: note = Category: MG79 guide RNA
  misc_feature 1..43: note = Description: MG79-3 sgRNA
  misc_difference 20..43: note = modified_base - a, c, t, g, unknown or other
  misc_difference 20..43: note = misc_feature - This region may encompass 20 or 24 nucleotides
  source 1..43: mol_type = unassigned DNA

SEQ ID NO: 3857 - DNA, 43 bp, unidentified; identical to SEQ ID NO: 3855
  misc_feature 1..43: note = Description of Unknown: uncultivated organism sequence
  misc_feature 1..43: note = Category: MG79 guide RNA
  misc_feature 1..43: note = Description: MG79-4 sgRNA
  misc_difference 20..43: note = modified_base - a, c, t, g, unknown or other
  misc_difference 20..43: note = misc_feature - This region may encompass 20 or 24 nucleotides
  source 1..43: mol_type = unassigned DNA

SEQ ID NO: 3858 - DNA, 24 bp, synthetic construct
  misc_feature 1..24: note = Description of Artificial Sequence: Synthetic oligonucleotide
  misc_feature 1..24: note = Category: Spacer segment
  misc_feature 1..24: note = Description: spacer segment 3
  source 1..24: mol_type = other DNA
gtcgaggcttgcgacgtggtggct

SEQ ID NO: 3859 - DNA, 24 bp, synthetic construct
  misc_feature 1..24: note = Description of Artificial Sequence: Synthetic oligonucleotide
  misc_feature 1..24: note = Category: Spacer segment
  misc_feature 1..24: note = Description: Spacer segment 4
  source 1..24: mol_type = other DNA
tggagatatcttgaaccttgcatc

SEQ ID NO: 3860 - DNA, 24 bp, synthetic construct
  misc_feature 1..24: note = Description of Artificial Sequence: Synthetic oligonucleotide
  misc_feature 1..24: note = Category: spacer segment
  misc_feature 1..24: note = Description: spacer segment 1
  source 1..24: mol_type = other DNA
cgtgagccaccacgtcgcaagcct

SEQ ID NO: 3861 - DNA, 24 bp, synthetic construct
  misc_feature 1..24: note = Description of Artificial Sequence: Synthetic oligonucleotide
  misc_feature 1..24: note = Category: spacer segment
  misc_feature 1..24: note = Description: spacer segment 2
  source 1..24: mol_type = other DNA
gtcgaggcttgcgacgtggtggct

SEQ ID NO: 3862-3868 - skipped (7 entries)

SEQ ID NO: 3869 - DNA, 26 bp, unidentified
  misc_feature 1..26: note = Description of Unknown: uncultivated organism sequence
  misc_feature 1..26: note = Category: MG28 effectors repeat
  misc_feature 1..26: note = Description: MG28-10, MG28-11 effectors repeat
  source 1..26: mol_type = unassigned DNA
catataaaatttctactattgtagat

SEQ ID NO: 3870-3889 - skipped (20 entries)

SEQ ID NO: 3890 - DNA, 10 bp, synthetic construct
  misc_feature 1..10: note = Description of Artificial Sequence: Synthetic oligonucleotide
  misc_feature 1..10: note = Category: PAM Sequence
  misc_feature 1..10: note = Description: PAM sequence corresponding to MG29-1 Target Loci 1
  source 1..10: mol_type = other DNA
aacacagttg

SEQ ID NO: 3891 - DNA, 10 bp, synthetic construct
  misc_feature 1..10: note = Description of Artificial Sequence: Synthetic oligonucleotide
  misc_feature 1..10: note = Category: PAM Sequence
  misc_feature 1..10: note = Description: PAM sequence corresponding to MG29-1 Target Loci 2
  source 1..10: mol_type = other DNA
tacagttttg

SEQ ID NO: 3892 - DNA, 10 bp, synthetic construct
  misc_feature 1..10: note = Description of Artificial Sequence: Synthetic oligonucleotide
  misc_feature 1..10: note = Category: PAM Sequence
  misc_feature 1..10: note = Description: PAM sequence corresponding to MG29-1 Target Loci 3
  source 1..10: mol_type = other DNA
tttgaggttg

SEQ ID NO: 3893 - DNA, 10 bp, synthetic construct
  misc_feature 1..10: note = Description of Artificial Sequence: Synthetic oligonucleotide
  misc_feature 1..10: note = Category: PAM Sequence
  misc_feature 1..10: note = Description: PAM sequence corresponding to MG29-1 Target Loci 4
  source 1..10: mol_type = other DNA
tttgtatttg

SEQ ID NO: 3894 - DNA, 10 bp, synthetic construct
  misc_feature 1..10: note = Description of Artificial Sequence: Synthetic oligonucleotide
  misc_feature 1..10: note = Category: PAM Sequence
  misc_feature 1..10: note = Description: PAM sequence corresponding to MG29-1 Target Loci 5
  source 1..10: mol_type = other DNA
agttactttg

SEQ ID NO: 3895 - DNA, 10 bp, synthetic construct
  misc_feature 1..10: note = Description of Artificial Sequence: Synthetic oligonucleotide
  misc_feature 1..10: note = Category: PAM Sequence
  misc_feature 1..10: note = Description: PAM sequence corresponding to MG29-1 Target Loci 6
  source 1..10: mol_type = other DNA
gatgaagttg

SEQ ID NO: 3896 - DNA, 10 bp, synthetic construct
  misc_feature 1..10: note = Description of Artificial Sequence: Synthetic oligonucleotide
  misc_feature 1..10: note = Category: PAM Sequence
  misc_feature 1..10: note = Description: PAM sequence corresponding to MG29-1 Target Loci 7
  source 1..10: mol_type = other DNA
tagctgtttg

SEQ ID NO: 3897 - DNA, 10 bp, synthetic construct
  misc_feature 1..10: note = Description of Artificial Sequence: Synthetic oligonucleotide
  misc_feature 1..10: note = Category: PAM Sequence
  misc_feature 1..10: note = Description: PAM sequence corresponding to MG29-1 Target Loci 8
  source 1..10: mol_type = other DNA
atgggctttg

SEQ ID NO: 3898 - DNA, 10 bp, synthetic construct
  misc_feature 1..10: note = Description of Artificial Sequence: Synthetic oligonucleotide
  misc_feature 1..10: note = Category: PAM Sequence
  misc_feature 1..10: note = Description: PAM sequence corresponding to MG29-1 Target Loci 9
  source 1..10: mol_type = other DNA
gggcaggttg

SEQ ID NO: 3899 - DNA, 10 bp, synthetic construct
  misc_feature 1..10: note = Description of Artificial Sequence: Synthetic oligonucleotide
  misc_feature 1..10: note = Category: PAM Sequence
  misc_feature 1..10: note = Description: PAM sequence corresponding to MG29-1 Target Loci 10
  source 1..10: mol_type = other DNA
tacatagttg

SEQ ID NO: 3900 - DNA, 10 bp, synthetic construct
  misc_feature 1..10: note = Description of Artificial Sequence: Synthetic oligonucleotide
  misc_feature 1..10: note = Category: PAM Sequence
  misc_feature 1..10: note = Description: PAM sequence corresponding to MG29-1 Target Loci 11
  source 1..10: mol_type = other DNA
tacgcatttg

SEQ ID NO: 3901 - DNA, 10 bp, synthetic construct
  misc_feature 1..10: note = Description of Artificial Sequence: Synthetic oligonucleotide
  misc_feature 1..10: note = Category: PAM Sequence
  misc_feature 1..10: note = Description: PAM sequence corresponding to MG29-1 Target Loci 12
  source 1..10: mol_type = other DNA
ccgcaagttg

SEQ ID NO: 3902 - DNA, 10 bp, synthetic construct
  misc_feature 1..10: note = Description of Artificial Sequence: Synthetic oligonucleotide
  misc_feature 1..10: note = Category: PAM Sequence
  misc_feature 1..10: note = Description: PAM sequence corresponding to MG31-1 Target Loci 1
  source 1..10: mol_type = other DNA
gttttcttta

SEQ ID NO: 3903 - DNA, 10 bp, synthetic construct
  misc_feature 1..10: note = Description of Artificial Sequence: Synthetic oligonucleotide
  misc_feature 1..10: note = Category: PAM Sequence
  misc_feature 1..10: note = Description: PAM sequence corresponding to MG31-1 Target Loci 2
  source 1..10: mol_type = other DNA
tacagttttg

SEQ ID NO: 3904 - DNA, 10 bp, synthetic construct
  misc_feature 1..10: note = Description of Artificial Sequence: Synthetic oligonucleotide
  misc_feature 1..10: note = Category: PAM Sequence
  misc_feature 1..10: note = Description: PAM sequence corresponding to MG31-1 Target Loci 3
  source 1..10: mol_type = other DNA
agaactttta

SEQ ID NO: 3905 - DNA, 10 bp, synthetic construct
  misc_feature 1..10: note = Description of Artificial Sequence: Synthetic oligonucleotide
  misc_feature 1..10: note = Category: PAM Sequence
  misc_feature 1..10: note = Description: PAM sequence corresponding to MG31-1 Target Loci 4
  source 1..10: mol_type = other DNA
tttgtatttg

SEQ ID NO: 3906 - DNA, 10 bp, synthetic construct
  misc_feature 1..10: note = Description of Artificial Sequence: Synthetic oligonucleotide
  misc_feature 1..10: note = Category: PAM Sequence
  misc_feature 1..10: note = Description: PAM sequence corresponding to MG31-1 Target Loci 5
  source 1..10: mol_type = other DNA
agttactttg

SEQ ID NO: 3907 - DNA, 10 bp, synthetic construct
  misc_feature 1..10: note = Description of Artificial Sequence: Synthetic oligonucleotide
  misc_feature 1..10: note = Category: PAM Sequence
  misc_feature 1..10: note = Description: PAM sequence corresponding to MG31-1 Target Loci 6
  source 1..10: mol_type = other DNA
ttttttttta

SEQ ID NO: 3908 - DNA, 10 bp, synthetic construct
  misc_feature 1..10: note = Description of Artificial Sequence: Synthetic oligonucleotide
  misc_feature 1..10: note = Category: PAM Sequence
  misc_feature 1..10: note = Description: PAM sequence corresponding to MG31-1 Target Loci 7
  source 1..10: mol_type = other DNA
tagctgtttg

SEQ ID NO: 3909 - DNA, 10 bp, synthetic construct
  misc_feature 1..10: note = Description of Artificial Sequence: Synthetic oligonucleotide
  misc_feature 1..10: note = Category: PAM Sequence
  misc_feature 1..10: note = Description: PAM sequence corresponding to MG31-1 Target Loci 8
  source 1..10: mol_type = other DNA
atgggctttg

SEQ ID NO: 3910 - DNA, 10 bp, synthetic construct
  misc_feature 1..10: note = Description of Artificial Sequence: Synthetic oligonucleotide
  misc_feature 1..10: note = Category: PAM Sequence
  misc_feature 1..10: note = Description: PAM sequence corresponding to MG31-1 Target Loci 9
  source 1..10: mol_type = other DNA
tccctcttta

SEQ ID NO: 3911 - DNA, 10 bp, synthetic construct
  misc_feature 1..10: note = Description of Artificial Sequence: Synthetic oligonucleotide
  misc_feature 1..10: note = Category: PAM Sequence
  misc_feature 1..10: note = Description: PAM sequence corresponding to MG31-1 Target Loci 10
  source 1..10: mol_type = other DNA
acaaatttta

SEQ ID NO: 3912 - DNA, 10 bp, synthetic construct
  misc_feature 1..10: note = Description of Artificial Sequence: Synthetic oligonucleotide
  misc_feature 1..10: note = Category: PAM Sequence
  misc_feature 1..10: note = Description: PAM sequence corresponding to MG31-1 Target Loci 11
  source 1..10: mol_type = other DNA
tacgcatttg

SEQ ID NO: 3913 - DNA, 10 bp, synthetic construct
  misc_feature 1..10: note = Description of Artificial Sequence: Synthetic oligonucleotide
  misc_feature 1..10: note = Category: PAM Sequence
  misc_feature 1..10: note = Description: PAM sequence corresponding to MG31-1 Target Loci 12
  source 1..10: mol_type = other DNA
gaaaaattta

SEQ ID NO: 3914 - DNA, 24 bp, synthetic construct
  misc_feature 1..24: note = Description of Artificial Sequence: Synthetic oligonucleotide
  misc_feature 1..24: note = Category: Target Sequence
  misc_feature 1..24: note = Description: MG29-1 Target Loci 1
  source 1..24: mol_type = other DNA
tgtcagaagcaaatgtaagcaata

SEQ ID NO: 3915 - DNA, 24 bp, synthetic construct
  misc_feature 1..24: note = Description of Artificial Sequence: Synthetic oligonucleotide
  misc_feature 1..24: note = Category: Target Sequence
  misc_feature 1..24: note = Description: MG29-1 Target Loci 2
  source 1..24: mol_type = other DNA
ctgaaaggttattgttgtgtttgt

SEQ ID NO: 3916 - DNA, 24 bp, synthetic construct
  misc_feature 1..24: note = Description of Artificial Sequence: Synthetic oligonucleotide
  misc_feature 1..24: note = Category: Target Sequence
  misc_feature 1..24: note = Description: MG29-1 Target Loci 3
  source 1..24: mol_type = other DNA
ctagtgaacacagttgtgtcagaa

SEQ ID NO: 3917 - DNA, 24 bp, synthetic construct
  misc_feature 1..24: note = Description of Artificial Sequence: Synthetic oligonucleotide
  misc_feature 1..24: note = Category: Target Sequence
  misc_feature 1..24: note = Description: MG29-1 Target Loci 4
  source 1..24: mol_type = other DNA
tgaagtcttacaaggttatcttat

SEQ ID NO: 3918 - DNA, 24 bp, synthetic construct
  misc_feature 1..24: note = Description of Artificial Sequence: Synthetic oligonucleotide
  misc_feature 1..24: note = Category: Target Sequence
  misc_feature 1..24: note = Description: MG29-1 Target Loci 5
  source 1..24: mol_type = other DNA
cactttccttagtgcgcaaaagaa

SEQ ID NO: 3919 - DNA, 24 bp, synthetic construct
  misc_feature 1..24: note = Description of Artificial Sequence: Synthetic oligonucleotide
  misc_feature 1..24: note = Category: Target Sequence
  misc_feature 1..24: note = Description: MG29-1 Target Loci 6
  source 1..24: mol_type = other DNA
gtggtgaggccctgggcaggttgg

SEQ ID NO: 3920 - DNA, 24 bp, synthetic construct
  misc_feature 1..24: note = Description of Artificial Sequence: Synthetic oligonucleotide
  misc_feature 1..24: note = Category: Target Sequence
  misc_feature 1..24: note = Description: MG29-1 Target Loci 7
  source 1..24: mol_type = other DNA
ggaggtcagaaatagggggtccag

SEQ ID NO: 3921 - DNA, 24 bp, synthetic construct
  misc_feature 1..24: note = Description of Artificial Sequence: Synthetic oligonucleotide
  misc_feature 1..24: note = Category: Target Sequence
  misc_feature 1..24: note = Description: MG29-1 Target Loci 8
  source 1..24: mol_type = other DNA
gaaagggggtggggggagtttgct

SEQ ID NO: 3922 - DNA, 24 bp, synthetic construct
  misc_feature 1..24: note = Description of Artificial Sequence: Synthetic oligonucleotide
  misc_feature 1..24: note = Category: Target Sequence
  misc_feature 1..24: note = Description: MG29-1 Target Loci 9
  source 1..24: mol_type = other DNA
gtatcaaggttacaagacaggttt

SEQ ID NO: 3923 - DNA, 24 bp, synthetic construct
  misc_feature 1..24: note = Description of Artificial Sequence: Synthetic oligonucleotide
  misc_feature 1..24: note = Category: Target Sequence
  misc_feature 1..24: note = Description: MG29-1 Target Loci 10
  source 1..24: mol_type = other DNA
tgtgagggagcaccgttctctaga

SEQ ID NO: 3924 - DNA, 24 bp, synthetic construct
  misc_feature 1..24: note = Description of Artificial Sequence: Synthetic oligonucleotide
  misc_feature 1..24: note = Category: Target Sequence
  misc_feature 1..24: note = Description: MG29-1 Target Loci 11
  source 1..24: mol_type = other DNA
ggtagttttctgtggtcctattat

SEQ ID NO: 3925 - DNA, 24 bp, synthetic construct
  misc_feature 1..24: note = Description of Artificial Sequence: Synthetic oligonucleotide
  misc_feature 1..24: note = Category: Target Sequence
  misc_feature 1..24: note = Description: MG29-1 Target Loci 12
  source 1..24: mol_type = other DNA
ccaggaaagttgatgtggtctgcg

SEQ ID NO: 3926 - DNA, 24 bp, synthetic construct
  misc_feature 1..24: note = Description of Artificial Sequence: Synthetic oligonucleotide
  misc_feature 1..24: note = Category: Target Sequence
  misc_feature 1..24: note = Description: MG31-1 Target Loci 1
  source 1..24: mol_type = other DNA
gttattaatttcttgctacttgtc

SEQ ID NO: 3927 - DNA, 24 bp, synthetic construct
  misc_feature 1..24: note = Description of Artificial Sequence: Synthetic oligonucleotide
  misc_feature 1..24: note = Category: Target Sequence
  misc_feature 1..24: note = Description: MG31-1 Target Loci 2
  source 1..24: mol_type = other DNA
ctgaaaggttattgttgtgtttgt

SEQ ID NO: 3928 - DNA, 24 bp, synthetic construct
  misc_feature 1..24: note = Description of Artificial Sequence: Synthetic oligonucleotide
  misc_feature 1..24: note = Category: Target Sequence
  misc_feature 1..24: note = Description: MG31-1 Target Loci 3
  source 1..24: mol_type = other DNA
gtgttagtacagttttgctgaaag

SEQ ID NO: 3929 - DNA, 24 bp, synthetic construct
  misc_feature 1..24: note = Description of Artificial Sequence: Synthetic oligonucleotide
  misc_feature 1..24: note = Category: Target Sequence
  misc_feature 1..24: note = Description: MG31-1 Target Loci 4
  source 1..24: mol_type = other DNA
tgaagtcttacaaggttatcttat

SEQ ID NO: 3930 - DNA, 24 bp, synthetic construct
  misc_feature 1..24: note = Description of Artificial Sequence: Synthetic oligonucleotide
  misc_feature 1..24: note = Category: Target Sequence
  misc_feature 1..24: note = Description: MG31-1 Target Loci 5
  source 1..24: mol_type = other DNA
cactttccttagtgcgcaaaagaa

SEQ ID NO: 3931 - DNA, 24 bp, synthetic construct
  misc_feature 1..24: note = Description of Artificial Sequence: Synthetic oligonucleotide
  misc_feature 1..24: note = Category: Target Sequence
  misc_feature 1..24: note = Description: MG31-1 Target Loci 6
  source 1..24: mol_type = other DNA
cctaggatgtttgaattttattaa

SEQ ID NO: 3932 - DNA, 24 bp, synthetic construct
  misc_feature 1..24: note = Description of Artificial Sequence: Synthetic oligonucleotide
  misc_feature 1..24: note = Category: Target Sequence
  misc_feature 1..24: note = Description: MG31-1 Target Loci 7
  source 1..24: mol_type = other DNA
ggaggtcagaaatagggggtccag

SEQ ID NO: 3933 - DNA, 24 bp, synthetic construct
  misc_feature 1..24: note = Description of Artificial Sequence: Synthetic oligonucleotide
  misc_feature 1..24: note = Category: Target Sequence
  misc_feature 1..24: note = Description: MG31-1 Target Loci 8
  source 1..24: mol_type = other DNA
gaaagggggtggggggagtttgct

SEQ ID NO: 3934 - DNA, 24 bp, synthetic construct
  misc_feature 1..24: note = Description of Artificial Sequence: Synthetic oligonucleotide
  misc_feature 1..24: note = Category: Target Sequence
  misc_feature 1..24: note = Description: MG31-1 Target Loci 9
  source 1..24: mol_type = other DNA
gccagagccggggtgtgcagacgg

SEQ ID NO: 3935 - DNA, 24 bp, synthetic construct
  misc_feature 1..24: note = Description of Artificial Sequence: Synthetic oligonucleotide
  misc_feature 1..24: note = Category: Target Sequence
  misc_feature 1..24: note = Description: MG31-1 Target Loci 10
  source 1..24: mol_type = other DNA
cttggaccttgttttgcttactgt

SEQ ID NO: 3936 - DNA, 24 bp, synthetic construct
  misc_feature 1..24: note = Description of Artificial Sequence: Synthetic oligonucleotide
  misc_feature 1..24: note = Category: Target Sequence
  misc_feature 1..24: note = Description: MG31-1 Target Loci 11
  source 1..24: mol_type = other DNA
ggtagttttctgtggtcctattat

SEQ ID NO: 3937 - DNA, 24 bp, synthetic construct
  misc_feature 1..24: note = Description of Artificial Sequence: Synthetic oligonucleotide
  misc_feature 1..24: note = Category: Target Sequence
  misc_feature 1..24: note = Description: MG31-1 Target Loci 12
  source 1..24: mol_type = other DNA
atcataagaagttagcttgacgca

SEQ ID NO: 3938 - protein, 7 aa, Simian virus 40
  REGION 1..7: note = Category: NLS
  REGION 1..7: note = Description: SV40
PKKKRKV

SEQ ID NO: 3939 - protein, 16 aa, unidentified
  REGION 1..16: note = Description of Unknown: nucleoplasmin bipartite NLS sequence
  REGION 1..16: note = Category: NLS
  REGION 1..16: note = Description: nucleoplasmin bipartite NLS
KRPAATKKAGQAKKKK

SEQ ID NO: 3940 - protein, 9 aa, unidentified
  REGION 1..9: note = Description of Unknown: c-myc NLS sequence
  REGION 1..9: note = Category: NLS
  REGION 1..9: note = Description: c-myc NLS
PAAKRVKLD

SEQ ID NO: 3941 - protein, 11 aa, unidentified
  REGION 1..11: note = Description of Unknown: c-myc NLS sequence
  REGION 1..11: note = Category: NLS
  REGION 1..11: note = Description: c-myc NLS
RQRRNELKRSP

SEQ ID NO: 3942 - protein, 38 aa, Homo sapiens
  REGION 1..38: note = Category: NLS
  REGION 1..38: note = Description: hRNPA1 M9 NLS
NQSSNFGPMKGGNFGGRSSGPYGGGGQYFAKPRNQGGY

SEQ ID NO: 3943 - protein, 42 aa, unidentified
  REGION 1..42: note = Description of Unknown: Importin-alpha IBB domain sequence
  REGION 1..42: note = Category: NLS
  REGION 1..42: note = Description: Importin-alpha IBB domain
RMRIZFKNKGKDTAELRRRRVEVSVELRKAKKDEQILKRRNV

SEQ ID NO: 3944 - protein, 8 aa, unidentified
  REGION 1..8: note = Description of Unknown: Myoma T protein sequence
  REGION 1..8: note = Category: NLS
  REGION 1..8: note = Description: Myoma T protein
VSRKRPRP

SEQ ID NO: 3945 - protein, 8 aa, unidentified
  REGION 1..8: note = Description of Unknown: Myoma T protein sequence
  REGION 1..8: note = Category: NLS
  REGION 1..8: note = Description: Myoma T protein
PPKKARED

SEQ ID NO: 3946 - protein, 8 aa, unidentified
  REGION 1..8: note = Description of Unknown: p53 sequence
  REGION 1..8: note = Category: NLS
  REGION 1..8: note = Description: p53
PQPKKKPL

SEQ ID NO: 3947 - protein, 12 aa, Mus sp.
  REGION 1..12: note = Category: NLS
  REGION 1..12: note = Description: mouse c-abl IV
SALIKKKKKMAP

SEQ ID NO: 3948 - protein, 5 aa, unidentified
  REGION 1..5: note = Category: NLS
  REGION 1..5: note = Description: influenza virus NS1
  source 1..5: note = Influenza virus
DRLRR

SEQ ID NO: 3949 - protein, 7 aa, unidentified
  REGION 1..7: note = Category: NLS
  REGION 1..7: note = Description: influenza virus NS1
  source 1..7: note = Influenza virus
PKQKKRK

SEQ ID NO: 3950 - protein, 10 aa, unidentified
  REGION 1..10: note = Category: NLS
  REGION 1..10: note = Description: Hepatitis virus delta antigen
  source 1..10: note = Hepatitis delta virus
RKLKKKIKKL

SEQ ID NO: 3951 - protein, 10 aa, Mus sp.
  REGION 1..10: note = Category: NLS
  REGION 1..10: note = Description: mouse Mx1 protein
REKKKFLKRR

SEQ ID NO: 3952 - protein, 20 aa, Homo sapiens
  REGION 1..20: note = Category: NLS
  REGION 1..20: note = Description: human poly(ADP-ribose) polymerase
KRKGDEVDGVDEVAKKKSKK

SEQ ID NO: 3953 - protein, 17 aa, Homo sapiens
  REGION 1..17: note = Category: NLS
  REGION 1..17: note = Description: steroid hormone receptors (human) glucocorticoid
RKCLQAGMNLEARKTKK

SEQ ID NO: 3954 - DNA, 24 bp, synthetic construct
  misc_feature 1..24: note = Description of Artificial Sequence: Synthetic oligonucleotide
  misc_feature 1..24: note = Category: MG29 HEK targeting guides
  misc_feature 1..24: note = Description: MG29-1 guide sequence 1 for targeting Apolipoprotein
  source 1..24: mol_type = other DNA
ccaggaaagttgatgtggtctgcg

SEQ ID NO: 3955 - DNA, 24 bp, synthetic construct
  misc_feature 1..24: note = Description of Artificial Sequence: Synthetic oligonucleotide
  misc_feature 1..24: note = Category: MG29 HEK targeting guides
  misc_feature 1..24: note = Description: MG29-1 guide sequence 1 for targeting HBB_R01
  source 1..24: mol_type = other DNA
ctagtgaacacagttgtgtcagaa

SEQ ID NO: 3956 - DNA, 24 bp, synthetic construct
  misc_feature 1..24: note = Description of Artificial Sequence: Synthetic oligonucleotide
  misc_feature 1..24: note = Category: MG29 HEK targeting guides
  misc_feature 1..24: note = Description: MG29-1 guide sequence 2 for targeting HBB_R01
  source 1..24: mol_type = other DNA
gtatcaaggttacaagacaggttt

SEQ ID NO: 3957 - DNA, 24 bp, synthetic construct
  misc_feature 1..24: note = Description of Artificial Sequence: Synthetic oligonucleotide
  misc_feature 1..24: note = Category: MG29 HEK targeting guides
  misc_feature 1..24: note = Description: MG29-1 guide sequence 3 for targeting HBB_R01
  source 1..24: mol_type = other DNA
gtggtgaggccctgggcaggttgg

SEQ ID NO: 3958 - DNA, 24 bp, synthetic construct
  misc_feature 1..24: note = Description of Artificial Sequence: Synthetic oligonucleotide
  misc_feature 1..24: note = Category: MG29 HEK targeting guides
  misc_feature 1..24: note = Description: MG29-1 guide sequence 4 for targeting HBB_R01
  source 1..24: mol_type = other DNA
tgtcagaagcaaatgtaagcaata

SEQ ID NO: 3959 - DNA, 24 bp, synthetic construct
  misc_feature 1..24: note = Description of Artificial Sequence: Synthetic oligonucleotide
  misc_feature 1..24: note = Category: MG29 HEK targeting guides
  misc_feature 1..24: note = Description: MG29-1 guide sequence 1 for targeting Apolipoprotein
  source 1..24: mol_type = other DNA
tgtgagggagcaccgttctctaga

SEQ ID NO: 3960 - DNA, 24 bp, synthetic construct
  misc_feature 1..24: note = Description of Artificial Sequence: Synthetic oligonucleotide
  misc_feature 1..24: note = Category: MG29 HEK targeting guides
  misc_feature 1..24: note = Description: MG29-1 guide sequence 1 for targeting VEGFA
  source 1..24: mol_type = other DNA
ccccgcctccgggcgcgggctccg

SEQ ID NO: 3961 - DNA, 24 bp, synthetic construct
  misc_feature 1..24: note = Description of Artificial Sequence: Synthetic oligonucleotide
  misc_feature 1..24: note = Category: MG29 HEK targeting guides
  misc_feature 1..24: note = Description: MG29-1 guide sequence 2 for targeting VEGFA
  source 1..24: mol_type = other DNA
ccgaagcgagaacagcccagaagt

SEQ ID NO: 3962 - DNA, 24 bp, synthetic construct
  misc_feature 1..24: note = Description of Artificial Sequence: Synthetic oligonucleotide
  misc_feature 1..24: note = Category: MG29 HEK targeting guides
  misc_feature 1..24: note = Description: MG29-1 guide sequence 3 for targeting VEGFA
  source 1..24: mol_type = other DNA
ccgcgcggaccacggctcctccga

SEQ ID NO: 3963 - DNA, 24 bp, synthetic construct
  misc_feature 1..24: note = Description of Artificial Sequence: Synthetic oligonucleotide
  misc_feature 1..24: note = Category: MG29 HEK targeting guides
  misc_feature 1..24: note = Description: MG29-1 guide sequence 4 for targeting VEGFA
  source 1..24: mol_type = other DNA
gaagttggacgaaaagtttcagtg

SEQ ID NO: 3964 - DNA, 24 bp, synthetic construct
  misc_feature 1..24: note = Description of Artificial Sequence: Synthetic oligonucleotide
  misc_feature 1..24: note = Category: MG29 HEK targeting guides
  misc_feature 1..24: note = Description: MG29-1 guide sequence 5 for targeting VEGFA
  source 1..24: mol_type = other DNA
gaggcggggtggagggggtcgggg

SEQ ID NO: 3965 - DNA, 24 bp, synthetic construct
  misc_feature 1..24: note = Description of Artificial Sequence: Synthetic oligonucleotide
  misc_feature 1..24: note = Category: MG29 HEK targeting guides
  misc_feature 1..24: note = Description: MG29-1 guide sequence 6 for targeting VEGFA
  source 1..24: mol_type = other DNA
ggcgcgggctccggcccctgcccg

SEQ ID NO: 3966 - DNA, 24 bp, synthetic construct
  misc_feature 1..24: note = Description of Artificial Sequence: Synthetic oligonucleotide
  misc_feature 1..24: note = Category: MG31 HEK targeting guides
  misc_feature 1..24: note = Description: MG31-1 guide sequence 1 for targeting Apolipoprotein
  source 1..24: mol_type = other DNA
atcataagaagttagcttgacgca

SEQ ID NO: 3967 - DNA, 24 bp, synthetic construct
  misc_feature 1..24: note = Description of Artificial Sequence: Synthetic oligonucleotide
  misc_feature 1..24: note = Category: MG31 HEK targeting guides
  misc_feature 1..24: note = Description: MG31-1 guide sequence 1 for targeting Albumin
  source 1..24: mol_type = other DNA
cctaggatgtttgaattttattaa

SEQ ID NO: 3968 - DNA, 24 bp, synthetic construct
  misc_feature 1..24: note = Description of Artificial Sequence: Synthetic oligonucleotide
  misc_feature 1..24: note = Category: MG31 HEK targeting guides
  misc_feature 1..24: note = Description: MG29-1, MG31-1 guide sequence 1 for targeting Fibrinogen
  source 1..24: mol_type = other DNA
ctgaaaggttattgttgtgtttgt

SEQ ID NO: 3969 - DNA, 24 bp, synthetic construct
  misc_feature 1..24: note = Description of Artificial Sequence: Synthetic oligonucleotide
  misc_feature 1..24: note = Category: MG31 HEK targeting guides
  misc_feature 1..24: note = Description: MG31-1 guide sequence 1 for targeting Apolipoprotein
  source 1..24: mol_type = other DNA
cttggaccttgttttgcttactgt

SEQ ID NO: 3970 - DNA, 24 bp, synthetic construct
  misc_feature 1..24: note = Description of Artificial Sequence: Synthetic oligonucleotide
  misc_feature 1..24: note = Category: MG31 HEK targeting guides
  misc_feature 1..24: note = Description: MG29-1, MG31-1 guide sequence 2 for targeting Apolipoprotein
  source 1..24: mol_type = other DNA
ggtagttttctgtggtcctattat

SEQ ID NO: 3971 - DNA, 24 bp, synthetic construct
  misc_feature 1..24: note = Description of Artificial Sequence: Synthetic oligonucleotide
  misc_feature 1..24: note = Category: MG31 HEK targeting guides
  misc_feature 1..24: note = Description: MG31-1 guide sequence 1 for targeting Fibrinogen
  source 1..24: mol_type = other DNA
gtgttagtacagttttgctgaaag

SEQ ID NO: 3972 - DNA, 24 bp, synthetic construct
  misc_feature 1..24: note = Description of Artificial Sequence: Synthetic oligonucleotide
  misc_feature 1..24: note = Category: MG31 HEK targeting guides
  misc_feature 1..24: note = Description: MG31-1 guide sequence 2 for targeting Fibrinogen
  source 1..24: mol_type = other DNA
gttattaatttcttgctacttgtc

SEQ ID NO: 3973 - DNA, 24 bp, synthetic construct
  misc_feature 1..24: note = Description of Artificial Sequence: Synthetic oligonucleotide
  misc_feature 1..24: note = Category: MG32 HEK targeting guides
  misc_feature 1..24: note = Description: MG28-1, MG28-1, MG30-1, MG30-1, MG32-1 guide sequence 1 for targeting Fibrinogen
  source 1..24: mol_type = other DNA
agcaaaactgtactaacactaaaa

SEQ ID NO: 3974 - DNA, 24 bp, synthetic construct
  misc_feature 1..24: note = Description of Artificial Sequence: Synthetic oligonucleotide
  misc_feature 1..24: note = Category: MG32 HEK targeting guides
  misc_feature 1..24: note = Description: MG28-1, MG28-1, MG30-1, MG30-1, MG32-1 guide sequence 1 for targeting VEGFA
  source 1..24: mol_type = other DNA
agtgcgacgccgcgagccccgacc

SEQ ID NO: 3975 - DNA, 24 bp, synthetic construct
  misc_feature 1..24: note = Description of Artificial Sequence: Synthetic oligonucleotide
  misc_feature 1..24: note = Category: MG32 HEK targeting guides
  misc_feature 1..24: note = Description: MG28-1, MG30-1, MG32-1 guide sequence 2 for targeting VEGFA
  source 1..24: mol_type = other DNA
caaagcccattccctctttagcca

SEQ ID NO: 3976 - DNA, 24 bp, synthetic construct
  misc_feature 1..24: note = Description of Artificial Sequence: Synthetic oligonucleotide
  misc_feature 1..24: note = Category: MG32 HEK targeting guides
  misc_feature 1..24: note = Description: MG28-1, MG28-1, MG29-1, MG30-1, MG30-1, MG31-1, MG32-1 guide sequence 1 for targeting Albumin
  source 1..24: mol_type = other DNA
cactttccttagtgcgcaaaagaa

SEQ ID NO: 3977 - DNA, 24 bp, synthetic construct
  misc_feature 1..24: note = Description of Artificial Sequence: Synthetic oligonucleotide
  misc_feature 1..24: note = Category: MG32 HEK targeting guides
  misc_feature 1..24: note = Description: MG28-1, MG28-1, MG30-1, MG30-1, MG32-1 guide sequence 1 for targeting VEGFA
  source 1..24: mol_type = other DNA
cgtccaacttctgggctgttctcg

SEQ ID NO: 3978 - DNA, 24 bp, synthetic construct
  misc_feature 1..24: note = Description of Artificial Sequence: Synthetic oligonucleotide
  misc_feature 1..24: note = Category: MG32 HEK targeting guides
  misc_feature 1..24: note = Description: MG28-1, MG30-1, MG32-1 guide sequence 1 for targeting Apolipoprotein
  source 1..24: mol_type = other DNA
ctaagacaaattttacttggacct

SEQ ID NO: 3979 - DNA, 24 bp, synthetic construct
  misc_feature 1..24: note = Description of Artificial Sequence: Synthetic oligonucleotide
  misc_feature 1..24: note = Category: MG32 HEK targeting guides
  misc_feature 1..24: note = Description: MG28-1, MG28-1, MG29-1, MG30-1, MG30-1, MG31-1, MG32-1 guide sequence 1 for targeting VEGFA
  source 1..24: mol_type = other DNA
gaaagggggtggggggagtttgct

SEQ ID NO: 3980 - DNA, 24 bp, synthetic construct
  misc_feature 1..24: note = Description of Artificial Sequence: Synthetic oligonucleotide
  misc_feature 1..24: note = Category: MG32 HEK targeting guides
  misc_feature 1..24: note = Description: MG28-1, MG28-1, MG30-1, MG30-1, MG31-1, MG32-1 guide sequence 2 for targeting VEGFA
  source 1..24: mol_type = other DNA
gccagagccggggtgtgcagacgg

SEQ ID NO: 3981 - DNA, 24 bp, synthetic construct
  misc_feature 1..24: note = Description of Artificial Sequence: Synthetic oligonucleotide
  misc_feature 1..24: note = Category: MG32 HEK targeting guides
  misc_feature 1..24: note = Description: MG28-1, MG28-1, MG29-1, MG30-1, MG30-1, MG31-1, MG32-1 guide sequence 3 for targeting VEGFA
  source 1..24: mol_type = other DNA
ggaggtcagaaatagggggtccag

SEQ ID NO: 3982 - DNA, 24 bp, synthetic construct
  misc_feature 1..24: note = Description of Artificial Sequence: Synthetic oligonucleotide
  misc_feature 1..24: note = Category: MG32 HEK targeting guides
  misc_feature 1..24: note = Description: MG28-1, MG28-1, MG30-1, MG30-1, MG32-1 guide sequence 1 for targeting Albumin
  source 1..24: mol_type = other DNA
gtatttgtgaagtcttacaaggtt

SEQ ID NO: 3983 - DNA, 24 bp, synthetic construct
  misc_feature 1..24: note = Description of Artificial Sequence: Synthetic oligonucleotide
  misc_feature 1..24: note = Category: MG32 HEK targeting guides
  misc_feature 1..24: note = Description: MG28-1, MG28-1, MG29-1, MG30-1, MG30-1, MG31-1, MG32-1 guide sequence 2 for targeting Albumin
  source 1..24: mol_type = other DNA
tgaagtcttacaaggttatcttat

SEQ ID NO: 3984 - DNA, 24 bp, synthetic construct
  misc_feature 1..24: note = Description of Artificial Sequence: Synthetic oligonucleotide
  misc_feature 1..24: note = Category: MG32 HEK targeting guides
  misc_feature 1..24: note = Description: MG28-1, MG30-1, MG32-1 guide sequence 3 for targeting Albumin
  source 1..24: mol_type = other DNA
ttaataagataaccttgtaagact

SEQ ID NO: 3985 - DNA, 44 bp, synthetic construct
  misc_feature 1..44: note = Description of Artificial Sequence: Synthetic oligonucleotide
  misc_feature 1..44: note = Category: MG29-1 guide modifications
  misc_feature 1..44: note = Description: MG29-1 guide modification test no. 1
  source 1..44: mol_type = other DNA
  misc_feature 1..20: note = RNA
  misc_feature 21..44: note = DNA
taatttctactcttgtagatgaaagggggtggggggagtttgct

SEQ ID NO: 3986 - DNA, 44 bp, synthetic construct; identical to SEQ ID NO: 3985
  misc_feature 1..44: note = Description of Artificial Sequence: Synthetic oligonucleotide
  misc_feature 1..44: note = Category: MG29-1 guide modifications
  misc_feature 1..44: note = Description: MG29-1 guide modification test no. 2
  source 1..44: mol_type = other DNA
  modified_base 44: mod_base = OTHER; note = Thymine
  misc_feature 1..20: note = RNA
  misc_feature 21..41: note = DNA
  misc_feature 42..44: note = RNA

SEQ ID NO: 3987 - DNA, 44 bp, synthetic construct; identical to SEQ ID NO: 3985
  misc_feature 1..44: note = Description of Artificial Sequence: Synthetic oligonucleotide
  misc_feature 1..44: note = Category: MG29-1 guide modifications
  misc_feature 1..44: note = Description: MG29-1 guide modification test no. 3
  source 1..44: mol_type = other DNA
  modified_base 44: mod_base = OTHER; note = Thymine
  misc_feature 1..20: note = RNA
  misc_feature 21..41: note = DNA
  misc_feature 42..44: note = RNA

SEQ ID NO: 3988 - DNA, 44 bp, synthetic construct; identical to SEQ ID NO: 3985
  misc_feature 1..44: note = Description of Artificial Sequence: Synthetic oligonucleotide
  misc_feature 1..44: note = Category: MG29-1 guide modifications
  misc_feature 1..44: note = Description: MG29-1 guide modification test no. 4
  source 1..44: mol_type = other DNA
  modified_base 44: mod_base = OTHER; note = Thymine
  misc_feature 1..20: note = RNA
  misc_feature 21..41: note = DNA
  misc_feature 42..44: note = RNA

SEQ ID NO: 3989 - DNA, 44 bp, synthetic construct; identical to SEQ ID NO: 3985
  misc_feature 1..44: note = Description of Artificial Sequence: Synthetic oligonucleotide
  misc_feature 1..44: note = Category: MG29-1 guide modifications
  misc_feature 1..44: note = Description: MG29-1 guide modification test no. 5
  source 1..44: mol_type = other DNA
  modified_base 44: mod_base = OTHER; note = Thymine
  misc_feature 1..20: note = RNA
  misc_feature 21..43: note = DNA
  misc_feature 44: note = RNA

SEQ ID NO: 3990 - DNA, 45 bp, synthetic construct
  misc_feature 1..45: note = Description of Artificial Sequence: Synthetic oligonucleotide
  misc_feature 1..45: note = Category: MG29-1 guide modifications
  misc_feature 1..45: note = Description: MG29-1 guide modification test no. 6
  source 1..45: mol_type = other DNA
  modified_base 45: mod_base = OTHER; note = Thymine
  misc_feature 1..21: note = RNA
  misc_feature 22..42: note = DNA
  misc_feature 43..45: note = RNA
ctaatttctactcttgtagatgaaagggggtggggggagtttgct

SEQ ID NO: 3991 - DNA, 45 bp, synthetic construct; identical to SEQ ID NO: 3990
  misc_feature 1..45: note = Description of Artificial Sequence: Synthetic oligonucleotide
  misc_feature 1..45: note = Category: MG29-1 guide modifications
  misc_feature 1..45: note = Description: MG29-1 guide modification test no. 7
  source 1..45: mol_type = other DNA
  modified_base 45: mod_base = OTHER; note = Thymine
  misc_feature 1..21: note = RNA
  misc_feature 22..44: note = DNA
  misc_feature 45: note = RNA

SEQ ID NO: 3992 - DNA, 44 bp, synthetic construct; identical to SEQ ID NO: 3985
  misc_feature 1..44: note = Description of Artificial Sequence: Synthetic oligonucleotide
  misc_feature 1..44: note = Category: MG29-1 guide modifications
  misc_feature 1..44: note = Description: MG29-1 guide modification test no. 8
  source 1..44: mol_type = other DNA
  misc_feature 1..20: note = RNA
  misc_feature 21..44: note = DNA

SEQ ID NO: 3993 - DNA, 22 bp, synthetic construct
  misc_feature 1..22: note = Description of Artificial Sequence: Synthetic oligonucleotide
  misc_feature 1..22: note = Category: MG29-1 spacer used in sgRNA to target mouse albumin intron 1
  misc_feature 1..22: note = Description: mAlb29-1-1
  source 1..22: mol_type = other DNA
gtatagcatggtcgagcaggca

SEQ ID NO: 3994 - DNA, 22 bp, synthetic construct
  misc_feature 1..22: note = Description of Artificial Sequence: Synthetic oligonucleotide
  misc_feature 1..22: note = Category: MG29-1 spacer used in sgRNA to target mouse albumin intron 1
  misc_feature 1..22: note = Description: mAlb29-1-2
  source 1..22: mol_type = other DNA
ccgatcgttacaggaaaatctg

SEQ ID NO: 3995 - DNA, 22 bp, synthetic construct
  misc_feature 1..22: note = Description of Artificial Sequence: Synthetic oligonucleotide
  misc_feature 1..22: note = Category: MG29-1 spacer used in sgRNA to target mouse albumin intron 1
  misc_feature 1..22: note = Description: mAlb29-1-3
  source 1..22: mol_type = other DNA
aatttattacggtctcataggg

SEQ ID NO: 3996 - DNA, 22 bp, synthetic construct
  misc_feature 1..22: note = Description of Artificial Sequence: Synthetic oligonucleotide
  misc_feature 1..22: note = Category: MG29-1 spacer used in sgRNA to target mouse albumin intron 1
  misc_feature 1..22: note = Description: mAlb29-1-4
  source 1..22: mol_type = other DNA
ttacggtctcatagggcctgcc

SEQ ID NO: 3997 - DNA, 22 bp, synthetic construct
  misc_feature 1..22: note = Description of Artificial Sequence: Synthetic oligonucleotide
  misc_feature 1..22: note = Category: MG29-1 spacer used in sgRNA to target mouse albumin intron 1
  misc_feature 1..22: note = Description: mAlb29-1-5
  source 1..22: mol_type = other DNA
cctgtaacgatcgggaactggc

SEQ ID NO: 3998 - DNA, 22 bp, synthetic construct
  misc_feature 1..22: note = Description of Artificial Sequence: Synthetic oligonucleotide
  misc_feature 1..22: note = Category: MG29-1 spacer used in sgRNA to target mouse albumin intron 1
  misc_feature 1..22: note = Description: mAlb29-1-7
  source 1..22: mol_type = other DNA
agtatagcatggtcgagcaggc

SEQ ID NO: 3999 - DNA, 22 bp, synthetic construct
  misc_feature 1..22: note = Description of Artificial Sequence: Synthetic oligonucleotide
  misc_feature 1..22: note = Category: MG29-1 spacer used in sgRNA to target mouse albumin intron 1
  misc_feature 1..22: note = Description: mAlb29-1-8
  source 1..22: mol_type = other DNA
ctgtaacgatcgggaactggca

SEQ ID NO: 4000 - DNA, 22 bp, synthetic construct
  misc_feature 1..22: note = Description of Artificial Sequence: Synthetic oligonucleotide
  misc_feature 1..22: note = Category: MG29-1 spacer used in sgRNA to target mouse albumin intron 1
  misc_feature 1..22: note = Description: mAlb29-1-9
  source 1..22: mol_type = other DNA
gatacagttgaatttattacgg

SEQ ID NO: 4001 - DNA, 22 bp, synthetic construct
  misc_feature 1..22: note = Description of Artificial Sequence: Synthetic oligonucleotide
  misc_feature 1..22: note = Category: MG29-1 spacer used in sgRNA to target mouse albumin intron 1
  misc_feature 1..22: note = Description: mAlb29-1-10
  source 1..22: mol_type = other DNA
tagtatagcatggtcgagcagg

SEQ ID NO: 4002 - DNA, 22 bp, synthetic construct
  misc_feature 1..22: note = Description of Artificial Sequence: Synthetic oligonucleotide
  misc_feature 1..22: note = Category: MG29-1 spacer used in sgRNA to target mouse albumin intron 1
  misc_feature 1..22: note = Description: mAlb29-1-11
  source 1..22: mol_type = other DNA
catctgagaacccttaggtggt

SEQ ID NO: 4003 - DNA, 22 bp, synthetic construct
  misc_feature 1..22: note = Description of Artificial Sequence: Synthetic oligonucleotide
  misc_feature 1..22: note = Category: MG29-1 spacer used in sgRNA to target mouse albumin intron 1
  misc_feature 1..22: note = Description: mAlb29-1-12
  source 1..22: mol_type = other DNA
agtgtagcagagaggaaccatt

SEQ ID NO: 4004 - DNA, 22 bp, synthetic construct
  misc_feature 1..22: note = Description of Artificial Sequence: Synthetic oligonucleotide
  misc_feature 1..22: note = Category: MG29-1 spacer used in sgRNA to target mouse albumin intron 1
  misc_feature 1..22: note = Description: mAlb29-1-13
  source 1..22: mol_type = other DNA
ctagtaatggaagcctggtatt

SEQ ID NO: 4005 - DNA, 22 bp, synthetic construct
  misc_feature 1..22: note = Description of Artificial Sequence: Synthetic oligonucleotide
  misc_feature 1..22: note = Category: MG29-1 spacer used in sgRNA to target mouse albumin intron 1
  misc_feature 1..22: note = Description: mAlb29-1-14
  source 1..22: mol_type = other DNA
ggtatctttgatgacaataatg

SEQ ID NO: 4006 - DNA, 22 bp, synthetic construct
  misc_feature 1..22: note = Description of Artificial Sequence: Synthetic oligonucleotide
  misc_feature 1..22: note = Category: MG29-1 spacer used in sgRNA to target mouse albumin intron 1
  misc_feature 1..22: note = Description: mAlb29-1-15
  source 1..22: mol_type = other DNA
tctagtaatggaagcctggtat

SEQ ID NO: 4007 - DNA, 22 bp, synthetic construct
  misc_feature 1..22: note = Description of Artificial Sequence: Synthetic oligonucleotide
  misc_feature 1..22: note = Category: MG29-1 spacer used in sgRNA to target mouse albumin intron 1
  misc_feature 1..22: note = Description: mAlb29-1-16
  source 1..22: mol_type = other DNA
tagtaatggaagcctggtattt

SEQ ID NO: 4008 - DNA, 22 bp, synthetic construct
  misc_feature 1..22: note = Description of Artificial Sequence: Synthetic oligonucleotide
  misc_feature 1..22: note = Category: MG29-1 spacer used in sgRNA to target mouse albumin intron 1
  misc_feature 1..22: note = Description: mAlb29-1-17
  source 1..22: mol_type = other DNA
gtatctttgatgacaataatgg

SEQ ID NO: 4009 - DNA, 22 bp, synthetic construct
  misc_feature 1..22: note = Description of Artificial Sequence: Synthetic oligonucleotide
  misc_feature 1..22: note = Category: MG29-1 spacer used in sgRNA to target mouse albumin intron 1
  misc_feature 1..22: note = Description: mAlb29-1-18
  source 1..22: mol_type = other DNA
aagattgatgaagacaactaac

SEQ ID NO: 4010 - DNA, 22 bp, synthetic construct
  misc_feature 1..22: note = Description of Artificial Sequence: Synthetic oligonucleotide
  misc_feature 1..22: note = Category: MG29-1 spacer used in sgRNA to target mouse albumin intron 1
  misc_feature 1..22: note = Description: mAlb29-1-19
  source 1..22: mol_type = other DNA
ctctctgctacactcaaagtta

SEQ ID NO: 4011 - DNA, 22 bp, synthetic construct
  misc_feature 1..22: note = Description of Artificial Sequence: Synthetic oligonucleotide
  misc_feature 1..22: note = Category: MG29-1 spacer used in sgRNA to target mouse albumin intron 1
  misc_feature 1..22: note = Description: mAlb29-1-20
  source 1..22: mol_type = other DNA
aaacccgttaagtgtttatatc

SEQ ID NO: 4012-4030 - skipped (19 entries)

SEQ ID NO: 4031 - DNA, 18 bp, synthetic construct
  misc_feature 1..18: note = Description of Artificial Sequence: Synthetic oligonucleotide
  misc_feature 1..18: note = Category: Primers
  misc_feature 1..18: note = Description: mAlb90F
  source 1..18: mol_type = other DNA
ctcctcttcgtctccggc

SEQ ID NO: 4032 - DNA, 19 bp, synthetic construct
  misc_feature 1..19: note = Description of Artificial Sequence: Synthetic oligonucleotide
  misc_feature 1..19: note = Category: Primers
  misc_feature 1..19: note = Description: mAlb1073R
  source 1..19: mol_type = other DNA
ctgccacattgctcagcac

SEQ ID NO: 4033 - DNA, 22 bp, synthetic construct
  misc_feature 1..22: note = Description of Artificial Sequence: Synthetic oligonucleotide
  misc_feature 1..22: note = Category: MG29-1 spacer used in sgRNA to target human albumin intron 1
  misc_feature 1..22: note = Description: hAlb_g63
  source 1..22: mol_type = other DNA
gtaaactctgcatctttaaaga

SEQ ID NO: 4034 - DNA, 22 bp, synthetic construct
  misc_feature 1..22: note = Description of Artificial Sequence: Synthetic oligonucleotide
  misc_feature 1..22: note = Category: MG29-1 spacer used in sgRNA to target human albumin intron 1
  misc_feature 1..22: note = Description: hAlb_g59
  source 1..22: mol_type = other DNA
tttcaaaatattgggctctgat

SEQ ID NO: 4035 - DNA, 22 bp, synthetic construct
  misc_feature 1..22: note = Description of Artificial Sequence: Synthetic oligonucleotide
  misc_feature 1..22: note = Category: MG29-1 spacer used in sgRNA to target human albumin intron 1
  misc_feature 1..22: note = Description: hAlb_g58
  source 1..22: mol_type = other DNA
agtaaactctgcatctttaaag

SEQ ID NO: 4036 - DNA, 22 bp, synthetic construct
  misc_feature 1..22: note = Description of Artificial Sequence: Synthetic oligonucleotide
  misc_feature 1..22: note = Category: MG29-1 spacer used in sgRNA to target human albumin intron 1
  misc_feature 1..22: note = Description: hAlb_g56
  source 1..22: mol_type = other DNA
aagatgcagagtttactaaaac

SEQ ID NO: 4037 - DNA, 22 bp, synthetic construct
  misc_feature 1..22: note = Description of Artificial Sequence: Synthetic oligonucleotide
  misc_feature 1..22: note = Category: MG29-1 spacer used in sgRNA to target human albumin intron 1
  misc_feature 1..22: note = Description: hAlb_g72
  source 1..22: mol_type = other DNA
aaaatattgggctctgattcct

SEQ ID NO: 4038 - DNA, 22 bp, synthetic construct
  misc_feature 1..22: note = Description of Artificial Sequence: Synthetic oligonucleotide
  misc_feature 1..22: note = Category: MG29-1 spacer used in sgRNA to target human albumin intron 1
  misc_feature 1..22: note = Description: hAlb_g70
  source 1..22: mol_type = other DNA
aaataaagcatagtgcaatgga

SEQ ID NO: 4039 - DNA, 22 bp, synthetic construct
  misc_feature 1..22: note = Description of Artificial Sequence: Synthetic oligonucleotide
  misc_feature 1..22: note = Category: MG29-1 spacer used in sgRNA to target human albumin intron 1
  misc_feature 1..22: note = Description: hAlb_g74
  source 1..22: mol_type = other DNA
aataaagcatagtgcaatggat

SEQ ID NO: 4040 - DNA, 22 bp, synthetic construct
  misc_feature 1..22: note = Description of Artificial Sequence: Synthetic oligonucleotide
  misc_feature 1..22: note = Category: MG29-1 spacer used in sgRNA to target human albumin intron 1
  misc_feature 1..22: note = Description: hAlb_g83
  source 1..22: mol_type = other DNA
tgagatcaacagcacaggtttt

SEQ ID NO: 4041 - DNA, 22 bp, synthetic construct
  misc_feature 1..22: note = Description of Artificial Sequence: Synthetic oligonucleotide
  misc_feature 1..22: note = Category: MG29-1 spacer used in sgRNA to target human albumin intron 1
  misc_feature 1..22: note = Description: hAlb_g85
  source 1..22: mol_type = other DNA
tgtaggaatcagagcccaatat

SEQ ID NO: 4042 - DNA, 22 bp, synthetic construct
  misc_feature 1..22: note = Description of Artificial Sequence: Synthetic oligonucleotide
  misc_feature 1..22: note = Category: MG29-1 spacer used in sgRNA to target human albumin intron 1
  misc_feature 1..22: note = Description: hAlb_g89
  source 1..22: mol_type = other DNA
ctgtaggaatcagagcccaata

SEQ ID NO: 4043 - DNA, 22 bp, synthetic construct
  misc_feature 1..22: note = Description of Artificial Sequence: Synthetic oligonucleotide
  misc_feature 1..22: note = Category: MG29-1 spacer used in sgRNA to target human albumin intron 1
  misc_feature 1..22: note = Description: hAlb_g88
  source 1..22: mol_type = other DNA
tctgtaggaatcagagcccaat

SEQ ID NO: 4044 - DNA, 22 bp, synthetic construct
  misc_feature 1..22: note = Description of Artificial Sequence: Synthetic oligonucleotide
  misc_feature 1..22: note = Category: MG29-1 spacer used in sgRNA to target human albumin intron 1
  misc_feature 1..22: note = Description: hAlb_g77
  source 1..22: mol_type = other DNA
gtgactgtaattttcttttgcg

SEQ ID NO: 4045 - DNA, 22 bp, synthetic construct
  misc_feature 1..22: note = Description of Artificial Sequence: Synthetic oligonucleotide
  misc_feature 1..22: note = Category: MG29-1 spacer used in sgRNA to target human albumin intron 1
  misc_feature 1..22: note = Description: hAlb_g69
  source 1..22: mol_type = other DNA
cttttgcgcactaaggaaagtg

SEQ ID NO: 4046 - DNA, 22 bp, synthetic construct
  misc_feature 1..22: note = Description of Artificial Sequence: Synthetic oligonucleotide
  misc_feature 1..22: note = Category: MG29-1 spacer used in sgRNA to target human albumin intron 1
  misc_feature 1..22: note = Description: hAlb_g66
  source 1..22: mol_type = other DNA
tgaagtcttacaaggttatctt

SEQ ID NO: 4047 - DNA, 22 bp, synthetic construct
  misc_feature 1..22: note = Description of Artificial Sequence: Synthetic oligonucleotide
  misc_feature 1..22: note = Category: MG29-1 spacer used in sgRNA to target human albumin intron 1
  misc_feature 1..22: note = Description: hAlb_g75
  source 1..22: mol_type = other DNA
agtgtctatcaacagcaaccaa

SEQ ID NO: 4048 - DNA, 22 bp, synthetic construct
  misc_feature 1..22: note = Description of Artificial Sequence: Synthetic oligonucleotide
  misc_feature 1..22: note = Category: MG29-1 spacer used in sgRNA to target human albumin intron 1
  misc_feature 1..22: note = Description: hAlb_g79
  source 1..22: mol_type = other DNA
cttagtgcgcaaaagaaaatta

SEQ ID NO: 4049 - DNA, 22 bp, synthetic construct
  misc_feature 1..22: note = Description of Artificial Sequence: Synthetic oligonucleotide
  misc_feature 1..22: note = Category: MG29-1 spacer used in sgRNA to target human albumin intron 1
  misc_feature 1..22: note = Description: hAlb_g82
  source 1..22: mol_type = other DNA
tagccttatattcaaacttaga

SEQ ID NO: 4050 - DNA, 22 bp, synthetic construct
  misc_feature 1..22: note = Description of Artificial Sequence: Synthetic oligonucleotide
  misc_feature 1..22: note = Category: MG29-1 spacer used in sgRNA to target human albumin intron 1
  misc_feature 1..22: note = Description: hAlb_g80
  source 1..22: mol_type = other DNA
ggatagttatgaattcaatctt

SEQ ID NO: 4051 - DNA, 22 bp, synthetic construct
  misc_feature 1..22: note = Description of Artificial Sequence: Synthetic oligonucleotide
  misc_feature 1..22: note = Category: MG29-1 spacer used in sgRNA to target human albumin intron 1
  misc_feature 1..22: note = Description: hAlb_g84
  source 1..22: mol_type = other DNA
cactttccttagtgcgcaaaag

SEQ ID NO: 4052 - DNA, 22 bp, synthetic construct
  misc_feature 1..22: note = Description of Artificial Sequence: Synthetic oligonucleotide
  misc_feature 1..22: note = Category: MG29-1 spacer used in sgRNA to target human albumin intron 1
  misc_feature 1..22: note = Description: hAlb_g81
  source 1..22: mol_type = other DNA
gtatttgtgaagtcttacaagg

SEQ ID NO: 4053 - DNA, 22 bp, synthetic construct
  misc_feature 1..22: note = Description of Artificial Sequence: Synthetic oligonucleotide
  misc_feature 1..22: note = Category: MG29-1 spacer used in sgRNA to target human albumin intron 1
  misc_feature 1..22: note = Description: hAlb_g90
  source 1..22: mol_type = other DNA
gtgtctatcaacagcaaccaag

SEQ ID NO: 4054 - DNA, 22 bp, synthetic construct
  misc_feature 1..22: note = Description of Artificial Sequence: Synthetic oligonucleotide
  misc_feature 1..22: note = Category: MG29-1 spacer used in sgRNA to target human albumin intron 1
  misc_feature 1..22: note = Description: hAlb_g87
  source 1..22: mol_type = other DNA
cgcactaaggaaagtgcaaagt

SEQ ID NO: 4055 - DNA, 22 bp, synthetic construct
  misc_feature 1..22: note = Description of Artificial Sequence: Synthetic oligonucleotide
  misc_feature 1..22: note = Category: MG29-1 spacer used in sgRNA to target human albumin intron 1
  misc_feature 1..22: note = Description: hAlb_g86
  source 1..22: mol_type = other DNA
gcgcactaaggaaagtgcaaag

SEQ ID NO: 4056-4078 - skipped (23 entries)

SEQ ID NO: 4079 - DNA, 22 bp, synthetic construct
  misc_feature 1..22: note = Description of Artificial Sequence: Synthetic oligonucleotide
  misc_feature 1..22: note = Category: Primers
  misc_feature 1..22: note = Description: hAlb 11F
  source 1..22: mol_type = other DNA
tcttctgtcaaccccacacgcc

SEQ ID NO: 4080 - DNA, 20 bp, synthetic construct
  misc_feature 1..20: note = Description of Artificial Sequence: Synthetic oligonucleotide
  misc_feature 1..20: note = Category: Primers
  misc_feature 1..20: note = Description: hAlb834R
  source 1..20: mol_type = other DNA
cttgtctgggcaagggaaga

SEQ ID NO: 4081 - DNA, 22 bp, synthetic construct
  misc_feature 1..22: note = Description of Artificial Sequence: Synthetic oligonucleotide
  misc_feature 1..22: note = Category: MG29-1 spacer used in sgRNA to target mouse hao-1 exons 1 to 4
  misc_feature 1..22: note = Description: mH29-1
  source 1..22: mol_type = other DNA
ccccagacctgtaatagtcata

SEQ ID NO: 4082 - DNA, 22 bp, synthetic construct
  misc_feature 1..22: note = Description of Artificial Sequence: Synthetic oligonucleotide
  misc_feature 1..22: note = Category: MG29-1 spacer used in sgRNA to target mouse hao-1 exons 1 to 4
  misc_feature 1..22: note = Description: mH29-2
  source 1..22: mol_type = other DNA
aggacagagagtcagcatgcca

SEQ ID NO: 4083 - DNA, 22 bp, synthetic construct
  misc_feature 1..22: note = Description of Artificial Sequence: Synthetic oligonucleotide
  misc_feature 1..22: note = Category: MG29-1 spacer used in sgRNA to target mouse hao-1 exons 1 to 4
  misc_feature 1..22: note = Description: mH29-3
  source 1..22: mol_type = other DNA
ggagacaacagtggacttgctg

SEQ ID NO: 4084 - DNA, 22 bp, synthetic construct
  misc_feature 1..22: note = Description of Artificial Sequence: Synthetic oligonucleotide
  misc_feature 1..22: note = Category: MG29-1 spacer used in sgRNA to target mouse hao-1 exons 1 to 4
  misc_feature 1..22: note = Description: mH29-4
  source 1..22: mol_type = other DNA
ccctaccctgccacaatgttgc

SEQ ID NO: 4085 - DNA, 22 bp, synthetic construct
  misc_feature 1..22: note = Description of Artificial Sequence: Synthetic oligonucleotide
  misc_feature 1..22: note = Category: MG29-1 spacer used in sgRNA to target mouse hao-1 exons 1 to 4
  misc_feature 1..22: note = Description: mH29-5
  source 1..22: mol_type = other DNA
cttacctagaaaatgcttggat

SEQ ID NO: 4086 - DNA, 22 bp, synthetic construct
  misc_feature 1..22: note = Description of Artificial Sequence: Synthetic oligonucleotide
  misc_feature 1..22: note = Category: MG29-1 spacer used in sgRNA to target mouse hao-1 exons 1 to 4
  misc_feature 1..22: note = Description: mH29-6
  source 1..22: mol_type = other DNA
acagatcgatatcagcaacgtt

SEQ ID NO: 4087 - DNA, 22 bp, synthetic construct
  misc_feature 1..22: note = Description of Artificial Sequence: Synthetic oligonucleotide
  misc_feature 1..22: note = Category: MG29-1 spacer used in sgRNA to target mouse hao-1 exons 1 to 4
  misc_feature 1..22: note = Description: mH29-7
  source 1..22: mol_type = other DNA
cgaagcatccgtggatagagct

SEQ ID NO: 4088 - DNA, 22 bp, synthetic construct
  misc_feature 1..22: note = Description of Artificial Sequence: Synthetic oligonucleotide
  misc_feature 1..22: note = Category: MG29-1 spacer used in sgRNA to target mouse hao-1 exons 1 to 4
  misc_feature 1..22: note = Description: mH29-8
  source 1..22: mol_type = other DNA
ttgggctacctcctcaatagaa

SEQ ID NO: 4089 - DNA, 22 bp, synthetic construct
  misc_feature 1..22: note = Description of Artificial Sequence: Synthetic oligonucleotide
  misc_feature 1..22: note = Category: MG29-1 spacer used in sgRNA to target mouse hao-1 exons 1 to 4
  misc_feature 1..22: note = Description: mH29-9
  source 1..22: mol_type = other DNA
aagctgccaccacaactcaggt

SEQ ID NO: 4090 - DNA, 22 bp, synthetic construct
  misc_feature 1..22: note = Description of Artificial Sequence: Synthetic oligonucleotide
  misc_feature 1..22: note = Category: MG29-1 spacer used in sgRNA to target mouse hao-1 exons 1 to 4
  misc_feature 1..22: note = Description: mH29-10
  source 1..22: mol_type = other DNA
tggtggcagcttgaacctgttc

SEQ ID NO: 4091 - DNA, 22 bp, synthetic construct
  misc_feature 1..22: note = Description of Artificial Sequence: Synthetic oligonucleotide
  misc_feature 1..22: note = Category: MG29-1 spacer used in sgRNA to target mouse hao-1 exons 1 to 4
  misc_feature 1..22: note = Description: mH29-11
  source 1..22: mol_type = other DNA
cgcacgtcatcaatgcggttgc

SEQ ID NO: 4092 - DNA, 22 bp, synthetic construct
  misc_feature 1..22: note = Description of Artificial Sequence: Synthetic oligonucleotide
  misc_feature 1..22: note = Category: MG29-1 spacer used in sgRNA to target mouse hao-1 exons 1 to 4
  misc_feature 1..22: note = Description: mH29-12
  source 1..22: mol_type = other DNA
cccaggtaaggggtgtccacag

SEQ ID NO: 4093 - DNA, 22 bp, synthetic construct
  misc_feature 1..22: note = Description of Artificial Sequence: Synthetic oligonucleotide
  misc_feature 1..22: note = Category: MG29-1 spacer used in sgRNA to target mouse hao-1 exons 1 to 4
  misc_feature 1..22: note = Description: mH29-13
  source 1..22: mol_type = other DNA
catccagcgaagtgcctctggg

SEQ ID NO: 4094 - DNA, 22 bp, synthetic construct
  misc_feature 1..22: note = Description of Artificial Sequence: Synthetic oligonucleotide
  misc_feature 1..22: note = Category: MG29-1 spacer used in sgRNA to target mouse hao-1 exons 1 to 4
  misc_feature 1..22: note = Description: mH29-14
  source 1..22: mol_type = other DNA
aaattccagatggaagctctat

SEQ ID NO: 4095 - DNA, 22 bp, synthetic construct
  misc_feature 1..22: note = Description of Artificial Sequence: Synthetic oligonucleotide
  misc_feature 1..22: note = Category: MG29-1 spacer used in sgRNA to target mouse hao-1 exons 1 to 4
  misc_feature 1..22: note = Description: mH29-15
  source 1..22: mol_type = other DNA
tgactgtggacaccccttacct

SEQ ID NO: 4096 - DNA, 22 bp, synthetic construct
  misc_feature 1..22: note = Description of Artificial Sequence: Synthetic oligonucleotide
  misc_feature 1..22: note = Category: MG29-1 spacer used in sgRNA to target mouse hao-1 exons 1 to 4
  misc_feature 1..22: note = Description: mH29-16
  source 1..22: mol_type = other DNA
attacagcctgtcagaccatgg

SEQ ID NO: 4097 - DNA, 22 bp, synthetic construct
  misc_feature 1..22: note = Description of Artificial Sequence: Synthetic oligonucleotide
  misc_feature 1..22: note = Category: MG29-1 spacer used in sgRNA to target mouse hao-1 exons 1 to 4
  misc_feature 1..22: note = Description: mH29-17
  source 1..22: mol_type = other DNA
gagacaacagtggacttgctga

SEQ ID NO: 4098 - DNA, 22 bp, synthetic construct
  misc_feature 1..22: note = Description of Artificial Sequence: Synthetic oligonucleotide
  misc_feature 1..22: note = Category: MG29-1 spacer used in sgRNA to target mouse hao-1 exons 1 to 4
  misc_feature 1..22: note = Description: mH29-18
  source 1..22: mol_type = other DNA
caacaataggcagtgatgtcaa

SEQ ID NO: 4099 - DNA, 22 bp, synthetic construct
  misc_feature 1..22: note = Description of Artificial Sequence: Synthetic oligonucleotide
  misc_feature 1..22: note = Category: MG29-1 spacer used in sgRNA to target mouse hao-1 exons 1 to 4
  misc_feature 1..22: note = Description: mH29-19
  source 1..22: mol_type = other DNA
cctcgactggtctgcatcagtg

SEQ ID NO: 4100 - DNA, 22 bp, synthetic construct
  misc_feature 1..22: note = Description of Artificial Sequence: Synthetic oligonucleotide
  misc_feature 1..22: note = Category: MG29-1 spacer used in sgRNA to target mouse hao-1 exons 1 to 4
  misc_feature 1..22: note = Description: mH29-20
  source 1..22: mol_type = other DNA
ataatcactgatgcagaccagt

SEQ ID NO: 4101 - DNA, 22 bp, synthetic construct
  misc_feature 1..22: note = Description of Artificial Sequence: Synthetic oligonucleotide
  misc_feature 1..22: note = Category: MG29-1 spacer used in sgRNA to target mouse hao-1 exons 1 to 4
  misc_feature 1..22: note = Description: mH29-21
  source 1..22: mol_type = other DNA
tcagctaacgtctcctgatcat

SEQ ID NO: 4102 - DNA, 22 bp, synthetic construct
  misc_feature 1..22: note = Description of Artificial Sequence: Synthetic oligonucleotide
  misc_feature 1..22: note = Category: MG29-1 spacer used in sgRNA to target mouse hao-1 exons 1 to 4
  misc_feature 1..22: note = Description: mH29-22
  source 1..22: mol_type = other DNA
ctgatatcgatctgtcaacttc

SEQ ID NO: 4103 - DNA, 22 bp, synthetic construct
  misc_feature 1..22: note = Description of Artificial Sequence: Synthetic oligonucleotide
  misc_feature 1..22: note = Category: MG29-1 spacer used in sgRNA to target mouse hao-1 exons 1 to 4
  misc_feature 1..22: note = Description: mH29-23
  source 1..22: mol_type = other DNA
taaagggcattttgagaggttt

SEQ ID NO: 4104 - DNA, 22 bp, synthetic construct
  misc_feature 1..22: note = Description of Artificial Sequence: Synthetic oligonucleotide
  misc_feature 1..22: note = Category: MG29-1 spacer used in sgRNA to target mouse hao-1 exons 1 to 4
  misc_feature 1..22: note = Description: mH29-24
  source 1..22: mol_type = other DNA
aatagcaaagtttcttacctag

SEQ ID NO: 4105 - DNA, 22 bp, synthetic construct
  misc_feature 1..22: note = Description of Artificial Sequence: Synthetic oligonucleotide
  misc_feature 1..22: note = Category: MG29-1 spacer used in sgRNA to target mouse hao-1 exons 1 to 4
  misc_feature 1..22: note = Description: mH29-25
  source 1..22: mol_type = other DNA
ggacagagagtcagcatgccaa

SEQ ID NO: 4106 - DNA, 22 bp, synthetic construct
  misc_feature 1..22: note = Description of Artificial Sequence: Synthetic oligonucleotide
  misc_feature 1..22: note = Category: MG29-1 spacer used in sgRNA to target mouse hao-1 exons 1 to 4
  misc_feature 1..22: note = Description: mH29-26
  source 1..22: mol_type = other DNA
tccatttcattacagcctgtca

SEQ ID NO: 4107 - DNA, 22 bp, synthetic construct
  misc_feature 1..22: note = Description of Artificial Sequence: Synthetic oligonucleotide
  misc_feature 1..22: note = Category: MG29-1 spacer used in sgRNA to target mouse hao-1 exons 1 to 4
  misc_feature 1..22: note = Description: mH29-27
  source 1..22: mol_type = other DNA
agtctgtgagatcatactgacc

SEQ ID NO: 4108 - DNA, 22 bp, synthetic construct
  misc_feature 1..22: note = Description of Artificial Sequence: Synthetic oligonucleotide
  misc_feature 1..22: note = Category: MG29-1 spacer used in sgRNA to target mouse hao-1 exons 1 to 4
  misc_feature 1..22: note = Description: mH29-28
  source 1..22: mol_type = other DNA
tagatgtacagttgcatccagc

SEQ ID NO: 4109 - DNA, 22 bp, synthetic construct
  misc_feature 1..22: note = Description of Artificial Sequence: Synthetic oligonucleotide
  misc_feature 1..22: note = Category: MG29-1 spacer used in sgRNA to target mouse hao-1 exons 1 to 4
  misc_feature 1..22: note = Description: mH29-29
  source 1..22: mol_type = other DNA
ccttaggagaaaatgccaaatc

SEQ ID NO: 4110 - DNA, 22 bp, synthetic construct
  misc_feature 1..22: note = Description of Artificial Sequence: Synthetic oligonucleotide
  misc_feature 1..22: note = Category: MG29-1 spacer used in sgRNA to target mouse hao-1 exons 1 to 4
  misc_feature 1..22: note = Description: mH29-30
  source 1..22: mol_type = other DNA
ctcctaagggaaattttggaga

SEQ ID NO: 4111 - DNA, 22 bp, synthetic construct
  misc_feature 1..22: note = Description of Artificial Sequence: Synthetic oligonucleotide
  misc_feature 1..22: note = Category: MG29-1 spacer used in sgRNA to target mouse hao-1 exons 1 to 4
  misc_feature 1..22: note = Description: mH29-31
  source 1..22: mol_type = other DNA
gctgataacatccaagcatttt

SEQ ID NO: 4112 - DNA, 22 bp, synthetic construct
  misc_feature 1..22: note = Description of Artificial Sequence: Synthetic oligonucleotide
  misc_feature 1..22: note = Category: MG29-1 spacer used in sgRNA to target mouse hao-1 exons 1 to 4
  misc_feature 1..22: note = Description: mH29-32
  source 1..22: mol_type = other DNA
aaatagcaaagtttcttaccta

SEQ ID NO: 4113 - DNA, 22 bp, synthetic construct
  misc_feature 1..22: note = Description of Artificial Sequence: Synthetic oligonucleotide
  misc_feature 1..22: note = Category: MG29-1 spacer used in sgRNA to target mouse hao-1 exons 1 to 4
  misc_feature 1..22: note = Description: mH29-33
  source 1..22: mol_type = other DNA
taggacagagagtcagcatgcc

SEQ ID NO: 4114 - DNA, 22 bp, synthetic construct
  misc_feature 1..22: note = Description of Artificial Sequence: Synthetic oligonucleotide
  misc_feature 1..22: note = Category: MG29-1 spacer used in sgRNA to target mouse hao-1 exons 1 to 4
  misc_feature 1..22: note = Description: mH29-34
  source 1..22: mol_type = other DNA
gggctactgccatgcagtgcat

SEQ ID NO: 4115 - DNA, 22 bp, synthetic construct
  misc_feature 1..22: note = Description of Artificial Sequence: Synthetic oligonucleotide
  misc_feature 1..22: note = Category: MG29-1 spacer used in sgRNA to target mouse hao-1 exons 1 to 4
  misc_feature 1..22: note = Description: mH29-35
  source 1..22: mol_type = other DNA
tctccaaaatttcccttaggag

SEQ ID NO: 4116 - DNA, 22 bp, synthetic construct
  misc_feature 1..22: note = Description of Artificial Sequence: Synthetic oligonucleotide
  misc_feature 1..22: note = Category: MG29-1 spacer used in sgRNA to target mouse hao-1 exons 1 to 4
  misc_feature 1..22: note = Description: mH29-36
  source 1..22: mol_type = other DNA
aattccagatggaagctctatc

SEQ ID NO: 4117 - DNA, 22 bp, synthetic construct
  misc_feature 1..22: note = Description of Artificial Sequence: Synthetic oligonucleotide
  misc_feature 1..22: note = Category: MG29-1 spacer used in sgRNA to target mouse hao-1 exons 1 to 4
  misc_feature 1..22: note = Description: mH29-37
  source 1..22: mol_type = other DNA
tcctaagggaaattttggagac

SEQ ID NO: 4118 - DNA, 22 bp, synthetic construct
  misc_feature 1..22: note = Description of Artificial Sequence: Synthetic oligonucleotide
  misc_feature 1..22: note = Category: MG29-1 spacer used in sgRNA to target mouse hao-1 exons 1 to 4
  misc_feature 1..22: note = Description: mH29-38
  source 1..22: mol_type = other DNA
ttacctagaaaatgcttggatg

SEQ ID NO: 4119 - DNA, 22 bp, synthetic construct
  misc_feature 1..22: note = Description of Artificial Sequence: Synthetic oligonucleotide
  misc_feature 1..22: note = Category: MG29-1 spacer used in sgRNA to target mouse hao-1 exons 1 to 4
  misc_feature 1..22: note = Description: mH29-39
  source 1..22: mol_type = other DNA
caaggccatatttgtgactgtg

SEQ ID NO: 4120 - DNA, 22 bp, synthetic construct
  misc_feature 1..22: note = Description of Artificial Sequence: Synthetic oligonucleotide
  misc_feature 1..22: note = Category: MG29-1 spacer used in sgRNA to target mouse hao-1 exons 1 to 4
  misc_feature 1..22: note = Description: mH29-40
  source 1..22: mol_type = other DNA
ctccatttcattacagcctgtc

SEQ ID NO: 4121 - DNA, 22 bp, synthetic construct
  misc_feature 1..22: note = Description of Artificial Sequence: Synthetic oligonucleotide
  misc_feature 1..22: note = Category: MG29-1 spacer used in sgRNA to target mouse hao-1 exons 1 to 4
  misc_feature 1..22: note = Description: mH29-41
  source 1..22: mol_type = other DNA
gcattttctcctaagggaaatt

SEQ ID NO: 4122 - DNA, 22 bp, synthetic construct
  misc_feature 1..22: note = Description of Artificial Sequence: Synthetic oligonucleotide
  misc_feature 1..22: note = Category: MG29-1 spacer used in sgRNA to target mouse hao-1 exons 1 to 4
  misc_feature 1..22: note = Description: mH29-42
  source 1..22: mol_type = other DNA
ttacctcgcacagtggccagct

SEQ ID NO: 4123 - DNA, 22 bp, synthetic construct
  misc_feature 1..22: note = Description of Artificial Sequence: Synthetic oligonucleotide
  misc_feature 1..22: note = Category: MG29-1 spacer used in sgRNA to target mouse hao-1 exons 1 to 4
  misc_feature 1..22: note = Description: mH29-43
  source 1..22: mol_type = other DNA
tctctcttttcttacctcgcac

SEQ ID NO: 4124 - DNA, 22 bp, synthetic construct
  misc_feature 1..22: note = Description of Artificial Sequence: Synthetic oligonucleotide
  misc_feature 1..22: note = Category: MG29-1 spacer used in sgRNA to target mouse hao-1 exons 1 to 4
  misc_feature 1..22: note = Description: mH29-44
  source 1..22: mol_type = other DNA
cttacctcgcacagtggccagc

SEQ ID NO: 4125 - DNA, 22 bp, synthetic construct
  misc_feature 1..22: note = Description of Artificial Sequence: Synthetic oligonucleotide
  misc_feature 1..22: note = Category: MG29-1 spacer used in sgRNA to target mouse hao-1 exons 1 to 4
  misc_feature 1..22: note = Description: mH29-45
  source 1..22: mol_type = other DNA
aaaccaatgatttggcattttc

SEQ ID NO: 4126-4170 - skipped (45 entries)

SEQ ID NO: 4171 - DNA, 20 bp, synthetic construct
  misc_feature 1..20: note = Description of Artificial Sequence: Synthetic oligonucleotide
  misc_feature 1..20: note = Category: Primers
  misc_feature 1..20: note = Description: PCR_mHE1_F_+233
  source 1..20: mol_type = other DNA
gtgaccaaccctacccgttt

SEQ ID NO: 4172 - DNA, 20 bp, synthetic construct
  misc_feature 1..20: note = Description of Artificial Sequence: Synthetic oligonucleotide
  misc_feature 1..20: note = Category: Primers
  misc_feature 1..20: note = Description: PCR_mHE1_R_-553
  source 1..20: mol_type = other DNA
gcaagcacctactgtctcgt

SEQ ID NO: 4173 - DNA, 20 bp, synthetic construct
  misc_feature 1..20: note = Description of Artificial Sequence: Synthetic oligonucleotide
  misc_feature 1..20: note = Category: Primers
  misc_feature 1..20: note = Description: HAO1_E2_F5721
  source 1..20: mol_type = other DNA
caacgaaggttccctccagg

SEQ ID NO: 4174 - DNA, 20 bp, synthetic construct
  misc_feature 1..20: note = Description of Artificial Sequence: Synthetic oligonucleotide
  misc_feature 1..20: note = Category: Primers
  misc_feature 1..20: note = Description: HAO1_E2_R6271
  source 1..20: mol_type = other DNA
ggaagggtgttcgagaagga

SEQ ID NO: 4175 - DNA, 20 bp, synthetic construct
  misc_feature 1..20: note = Description of Artificial Sequence: Synthetic oligonucleotide
  misc_feature 1..20: note = Category: Primers
  misc_feature 1..20: note = Description: HAO1_E3_F23198
  source 1..20: mol_type = other DNA
tgccctagacaagctgacac

SEQ ID NO: 4176 - DNA, 20 bp, synthetic construct
  misc_feature 1..20: note = Description of Artificial Sequence: Synthetic oligonucleotide
  misc_feature 1..20: note = Category: Primers
  misc_feature 1..20: note = Description: HAO1_E3_R23879
  source 1..20: mol_type = other DNA
cagattctggaagtggccca

SEQ ID NO: 4177 - DNA, 20 bp, synthetic construct
  misc_feature 1..20: note = Description of Artificial Sequence: Synthetic oligonucleotide
  misc_feature 1..20: note = Category: Primers
  misc_feature 1..20: note = Description: HAO1_E4_F31087
  source 1..20: mol_type = other DNA
cctgtaggtggctgagtacg

SEQ ID NO: 4178 - DNA, 20 bp, synthetic construct
  misc_feature 1..20: note = Description of Artificial Sequence: Synthetic oligonucleotide
  misc_feature 1..20: note = Category: Primers
  misc_feature 1..20: note = Description: HAO1_E4_R31650
  source 1..20: mol_type = other DNA
aggtttggttcccctcacct

SEQ ID NO: 4179 - DNA, 24 bp, synthetic construct
  misc_feature 1..24: note = Description of Artificial Sequence: Synthetic oligonucleotide
  misc_feature 1..24: note = Category: Primers
  misc_feature 1..24: note = Description: Seq_mHE1_F_+139
  source 1..24: mol_type = other DNA
gtctaggcatacaatgtttgctca

SEQ ID NO: 4180 - DNA, 23 bp, synthetic construct
  misc_feature 1..23: note = Description of Artificial Sequence: Synthetic oligonucleotide
  misc_feature 1..23: note = Category: Primers
  misc_feature 1..23: note = Description: 5938F Seq_HAO1_E2
  source 1..23: mol_type = other DNA
ctatgcaaggaaaagatttggcc

SEQ ID NO: 4181 - DNA, 23 bp, synthetic construct
  misc_feature 1..23: note = Description of Artificial Sequence: Synthetic oligonucleotide
  misc_feature 1..23: note = Category: Primers
  misc_feature 1..23: note = Description: HAO1_E3_F23476
  source 1..23: mol_type = other DNA
tcttcccccttgaatgaaacact

SEQ ID NO: 4182 - DNA, 20 bp, synthetic construct
  misc_feature 1..20: note = Description of Artificial Sequence: Synthetic oligonucleotide
  misc_feature 1..20: note = Category: Primers
  misc_feature 1..20: note = Description: HAO1_E3_R23879
  source 1..20: mol_type = other DNA
cagattctggaagtggccca

SEQ ID NO: 4183 - DNA, 20 bp, synthetic construct
  misc_feature 1..20: note = Description of Artificial Sequence: Synthetic oligonucleotide
  misc_feature 1..20: note = Category: Primers
  misc_feature 1..20: note = Description: HAO1_E4_R31650
  source 1..20: mol_type = other DNA
aggtttggttcccctcacct

SEQ ID NO: 4184 - DNA, 22 bp, synthetic construct
  misc_feature 1..22: note = Description of Artificial Sequence: Synthetic oligonucleotide
  misc_feature 1..22: note = Category: MG29-1 spacer sequences identified in exons 1 to 4 of the human hao-1 gene
  misc_feature 1..22: note = Description: hH29-1
  source 1..22: mol_type = other DNA
gcatgttgttcataatcattga

SEQ ID NO: 4185 - DNA, 22 bp, synthetic construct
  misc_feature 1..22: note = Description of Artificial Sequence: Synthetic oligonucleotide
  misc_feature 1..22: note = Category: MG29-1 spacer sequences identified in exons 1 to 4 of the human hao-1 gene
  misc_feature 1..22: note = Description: hH29-2
  source 1..22: mol_type = other DNA
gaagtactgatttagcatgttg

SEQ ID NO: 4186 - DNA, 22 bp, synthetic construct
  misc_feature 1..22: note = Description of Artificial Sequence: Synthetic oligonucleotide
  misc_feature 1..22: note = Category: MG29-1 spacer sequences identified in exons 1 to 4 of the human hao-1 gene
  misc_feature 1..22: note = Description: hH29-3
  source 1..22: mol_type = other DNA
tatcaatgattatgaacaacat

SEQ ID NO: 4187 - DNA, 22 bp, synthetic construct
  misc_feature 1..22: note = Description of Artificial Sequence: Synthetic oligonucleotide
  misc_feature 1..22: note = Category: MG29-1 spacer sequences identified in exons 1 to 4 of the human hao-1 gene
  misc_feature 1..22: note = Description: hH29-4
  source 1..22: mol_type = other DNA
ccccagacctgtaatagtcata

SEQ ID NO: 4188 - DNA, 22 bp, synthetic construct
  misc_feature 1..22: note = Description of Artificial Sequence: Synthetic oligonucleotide
  misc_feature 1..22: note = Category: MG29-1 spacer sequences identified in exons 1 to 4 of the human hao-1 gene
  misc_feature 1..22: note = Description: hH29-5
  source 1..22: mol_type = other DNA
ttcatcatttgccccagacctg

SEQ ID NO: 4189 - DNA, 22 bp, synthetic construct
  misc_feature 1..22: note = Description of Artificial Sequence: Synthetic oligonucleotide
  misc_feature 1..22: note = Category: MG29-1 spacer sequences identified in exons 1 to 4 of the human hao-1 gene
  misc_feature 1..22: note = Description: hH29-6
  source 1..22: mol_type = other DNA
ttacctggaaaatgctgcaata

SEQ ID NO: 4190 - DNA, 22 bp, synthetic construct
  misc_feature 1..22: note = Description of Artificial Sequence: Synthetic oligonucleotide
  misc_feature 1..22: note = Category: MG29-1 spacer sequences identified in exons 1 to 4 of the human hao-1 gene
  misc_feature 1..22: note = Description: hH29-7
  source 1..22: mol_type = other DNA
cttacctggaaaatgctgcaat

SEQ ID NO: 4191 - DNA, 22 bp, synthetic construct
  misc_feature 1..22: note = Description of Artificial Sequence: Synthetic oligonucleotide
  misc_feature 1..22: note = Category: MG29-1 spacer sequences identified in exons 1 to 4 of the human hao-1 gene
  misc_feature 1..22: note = Description: hH29-8
  source 1..22: mol_type = other DNA
gctgataatattgcagcatttt

SEQ ID NO: 4192 - DNA, 22 bp, synthetic construct
  misc_feature 1..22: note = Description of Artificial Sequence: Synthetic oligonucleotide
  misc_feature 1..22: note = Category: MG29-1 spacer sequences identified in exons 1 to 4 of the human hao-1 gene
  misc_feature 1..22: note = Description: hH29-9
  source 1..22: mol_type = other DNA
aaaaataaattttcttacctgg

SEQ ID NO: 4193 - DNA, 22 bp, synthetic construct
  misc_feature 1..22: note = Description of Artificial Sequence: Synthetic oligonucleotide
  misc_feature 1..22: note = Category: MG29-1 spacer sequences identified in exons 1 to 4 of the human hao-1 gene
  misc_feature 1..22: note = Description: hH29-10
  source 1..22: mol_type = other DNA
aaaaaataaattttcttacctg

SEQ ID NO: 4194 - DNA, 22 bp, synthetic construct
  misc_feature 1..22: note = Description of Artificial Sequence: Synthetic oligonucleotide
  misc_feature 1..22: note = Category: MG29-1 spacer sequences identified in exons 1 to 4 of the human hao-1 gene
  misc_feature 1..22: note = Description: hH29-11
  source 1..22: mol_type = other DNA
attttattttttaattctagat

SEQ ID NO: 4195 - DNA, 22 bp, synthetic construct
  misc_feature 1..22: note = Description of Artificial Sequence: Synthetic oligonucleotide
  misc_feature 1..22: note = Category: MG29-1 spacer sequences identified in exons 1 to 4 of the human hao-1 gene
  misc_feature 1..22: note = Description: hH29-12
  source 1..22: mol_type = other DNA
ttttattttttaattctagatg

SEQ ID NO: 4196 - DNA, 22 bp, synthetic construct
  misc_feature 1..22: note = Description of Artificial Sequence: Synthetic oligonucleotide
  misc_feature 1..22: note = Category: MG29-1 spacer sequences identified in exons 1 to 4 of the human hao-1 gene
  misc_feature 1..22: note = Description: hH29-13
  source 1..22: mol_type = other DNA
attttttaattctagatggaag

SEQ ID NO: 4197 - DNA, 22 bp, synthetic construct
  misc_feature 1..22: note = Description of Artificial Sequence: Synthetic oligonucleotide
  misc_feature 1..22: note = Category: MG29-1 spacer sequences identified in exons 1 to 4 of the human hao-1 gene
  misc_feature 1..22: note = Description: hH29-14
  source 1..22: mol_type = other DNA
ttttttaattctagatggaagc

SEQ ID NO: 4198 - DNA, 22 bp, synthetic construct
  misc_feature 1..22: note = Description of Artificial Sequence: Synthetic oligonucleotide
  misc_feature 1..22: note = Category: MG29-1 spacer sequences identified in exons 1 to 4 of the human hao-1 gene
  misc_feature 1..22: note = Description: hH29-15
  source 1..22: mol_type = other DNA
ttaattctagatggaagctgta

SEQ ID NO: 4199 - DNA, 22 bp, synthetic construct
  misc_feature 1..22: note = Description of Artificial Sequence: Synthetic oligonucleotide
  misc_feature 1..22: note = Category: MG29-1 spacer sequences identified in exons 1 to 4 of the human hao-1 gene
  misc_feature 1..22: note = Description: hH29-16
  source 1..22: mol_type = other DNA
taattctagatggaagctgtat

SEQ ID NO: 4200 - DNA, 22 bp, synthetic construct
  misc_feature 1..22: note = Description of Artificial Sequence: Synthetic oligonucleotide
  misc_feature 1..22: note = Category: MG29-1 spacer sequences identified in exons 1 to 4 of the human hao-1 gene
  misc_feature 1..22: note = Description: hH29-17
  source 1..22: mol_type = other DNA
aattctagatggaagctgtatc

SEQ ID NO: 4201 - DNA, 22 bp, synthetic construct
  misc_feature 1..22: note = Description of Artificial Sequence: Synthetic oligonucleotide
  misc_feature 1..22: note = Category: MG29-1 spacer sequences identified in exons 1 to 4 of the human hao-1 gene
  misc_feature 1..22: note = Description: hH29-18
  source 1..22: mol_type = other DNA
attctagatggaagctgtatcc

SEQ ID NO: 4202 - DNA, 22 bp, synthetic construct
  misc_feature 1..22: note = Description of Artificial Sequence: Synthetic oligonucleotide
  misc_feature 1..22: note = Category: MG29-1 spacer sequences identified in exons 1 to 4 of the human hao-1 gene
  misc_feature 1..22: note = Description: hH29-19
  source 1..22: mol_type = other DNA
agcaacattccggagcatcctt

SEQ ID NO: 4203 - DNA, 22 bp, synthetic construct
  misc_feature 1..22: note = Description of Artificial Sequence: Synthetic oligonucleotide
  misc_feature 1..22: note = Category: MG29-1 spacer sequences identified in exons 1 to 4 of the human hao-1 gene
  misc_feature 1..22: note = Description: hH29-20
  source 1..22: mol_type = other DNA
aggacagagggtcagcatgcca

SEQ ID NO: 4204 - DNA, 22 bp, synthetic construct
  misc_feature 1..22: note = Description of Artificial Sequence: Synthetic oligonucleotide
  misc_feature 1..22: note = Category: MG29-1 spacer sequences identified in exons 1 to 4 of the human hao-1 gene
  misc_feature 1..22: note = Description: hH29-21
  source 1..22: mol_type = other DNA
ggacagagggtcagcatgccaa

SEQ ID NO: 4205 - DNA, 22 bp, synthetic construct
  misc_feature 1..22: note = Description of Artificial Sequence: Synthetic oligonucleotide
  misc_feature 1..22: note = Category: MG29-1 spacer sequences identified in exons 1 to 4 of the human hao-1 gene
  misc_feature 1..22: note = Description: hH29-22
  source 1..22: mol_type = other DNA
tttctcagcctgtcagtccctg

SEQ ID NO: 4206 - DNA, 22 bp, synthetic construct
  misc_feature 1..22: note = Description of Artificial Sequence: Synthetic oligonucleotide
  misc_feature 1..22: note = Category: MG29-1 spacer sequences identified in exons 1 to 4 of the human hao-1 gene
  misc_feature 1..22: note = Description: hH29-23
  source 1..22: mol_type = other DNA
tcagcctgtcagtccctgggaa

SEQ ID NO: 4207 - DNA, 22 bp, synthetic construct
  misc_feature 1..22: note = Description of Artificial Sequence: Synthetic oligonucleotide
  misc_feature 1..22: note = Category: MG29-1 spacer sequences identified in exons 1 to 4 of the human hao-1 gene
  misc_feature 1..22: note = Description: hH29-24
  source 1..22: mol_type = other DNA
tgacagtggacacaccttacct

SEQ ID NO: 4208 - DNA, 22 bp, synthetic construct
  misc_feature 1..22: note = Description of Artificial Sequence: Synthetic oligonucleotide
  misc_feature 1..22: note = Category: MG29-1 spacer sequences identified in exons 1 to 4 of the human hao-1 gene
  misc_feature 1..22: note = Description: hH29-25
  source 1..22: mol_type = other DNA
aatctgttacgcacatcatcca

SEQ ID NO: 4209 - DNA, 22 bp, synthetic construct
  misc_feature 1..22: note = Description of Artificial Sequence: Synthetic oligonucleotide
  misc_feature 1..22: note = Category: MG29-1 spacer sequences identified in exons 1 to 4 of the human hao-1 gene
  misc_feature 1..22: note = Description: hH29-26
  source 1..22: mol_type = other DNA
atgcatttcttattttaggatg

SEQ ID NO: 4210 - DNA, 22 bp, synthetic construct
  misc_feature 1..22: note = Description of Artificial Sequence: Synthetic oligonucleotide
  misc_feature 1..22: note = Category: MG29-1 spacer sequences identified in exons 1 to 4 of the human hao-1 gene
  misc_feature 1..22: note = Description: hH29-27
  source 1..22: mol_type = other DNA
tgcatttcttattttaggatga

SEQ ID NO: 4211 - DNA, 22 bp, synthetic construct
  misc_feature 1..22: note = Description of Artificial Sequence: Synthetic oligonucleotide
  misc_feature 1..22: note = Category: MG29-1 spacer sequences identified in exons 1 to 4 of the human hao-1 gene
  misc_feature 1..22: note = Description: hH29-28
  source 1..22: mol_type = other DNA
ttattttaggatgaaaaatttt

SEQ ID NO: 4212 - DNA, 22 bp, synthetic construct
  misc_feature 1..22: note = Description of Artificial Sequence: Synthetic oligonucleotide
  misc_feature 1..22: note = Category: MG29-1 spacer sequences identified in exons 1 to 4 of the human hao-1 gene
  misc_feature 1..22: note = Description: hH29-29
  source 1..22: mol_type = other DNA
aggatgaaaaattttgaaacca

SEQ ID NO: 4213 - DNA, 22 bp, synthetic construct
  misc_feature 1..22: note = Description of Artificial Sequence: Synthetic oligonucleotide
  misc_feature 1..22: note = Category: MG29-1 spacer sequences identified in exons 1 to 4 of the human hao-1 gene
  misc_feature 1..22: note = Description: hH29-30
  source 1..22: mol_type = other DNA
ggatgaaaaattttgaaaccag

SEQ ID NO: 4214 - DNA, 22 bp, synthetic construct
  misc_feature 1..22: note = Description of Artificial Sequence: Synthetic oligonucleotide
  misc_feature 1..22: note = Category: MG29-1 spacer sequences identified in exons 1 to 4 of the human hao-1 gene
  misc_feature 1..22: note = Description: hH29-31
  source 1..22: mol_type = other DNA
ctcaggagaaaatgataaagta

SEQ ID NO: 4215 - DNA, 22 bp, synthetic construct
  misc_feature 1..22: note = Description of Artificial Sequence: Synthetic oligonucleotide
  misc_feature 1..22: note = Category: MG29-1 spacer sequences identified in exons 1 to 4 of the human hao-1 gene
  misc_feature 1..22: note = Description: hH29-32
  source 1..22: mol_type = other DNA
cctcaggagaaaatgataaagt

SEQ ID NO: 4216 - DNA, 22 bp, synthetic construct
  misc_feature 1..22: note = Description of Artificial Sequence: Synthetic oligonucleotide
  misc_feature 1..22: note = Category: MG29-1 spacer sequences identified in exons 1 to 4 of the human hao-1 gene
  misc_feature 1..22: note = Description: hH29-33
  source 1..22: mol_type = other DNA
gaaaccagtactttatcatttt

SEQ ID NO: 4217 - DNA, 22 bp, synthetic construct
  misc_feature 1..22: note = Description of Artificial Sequence: Synthetic oligonucleotide
  misc_feature 1..22: note = Category: MG29-1 spacer sequences identified in exons 1 to 4 of the human hao-1 gene
  misc_feature 1..22: note = Description: hH29-34
  source 1..22: mol_type = other DNA
aaaccagtactttatcattttc

SEQ ID NO: 4218 - DNA, 22 bp, synthetic construct
  misc_feature 1..22: note = Description of Artificial Sequence: Synthetic oligonucleotide
  misc_feature 1..22: note = Category: MG29-1 spacer sequences identified in exons 1 to 4 of the human hao-1 gene
  misc_feature 1..22: note = Description: hH29-35
  source 1..22: mol_type = other DNA
tcattttctcctgaggaaaatt

SEQ ID NO: 4219 - DNA, 22 bp, synthetic construct
  misc_feature 1..22: note = Description of Artificial Sequence: Synthetic oligonucleotide
  misc_feature 1..22: note = Category: MG29-1 spacer sequences identified in exons 1 to 4 of the human hao-1 gene
  misc_feature 1..22: note = Description: hH29-36
  source 1..22: mol_type = other DNA
ctcctgaggaaaattttggaga

SEQ ID NO: 4220 - DNA, 22 bp, synthetic construct
  misc_feature 1..22: note = Description of Artificial Sequence: Synthetic oligonucleotide
  misc_feature 1..22: note = Category: MG29-1 spacer sequences identified in exons 1 to 4 of the human hao-1 gene
  misc_feature 1..22: note = Description: hH29-37
  source 1..22: mol_type = other DNA
tcctgaggaaaattttggagac

SEQ ID NO: 4221 - DNA, 22 bp, synthetic construct
  misc_feature 1..22: note = Description of Artificial Sequence: Synthetic oligonucleotide
  misc_feature 1..22: note = Category: MG29-1 spacer sequences identified in exons 1 to 4 of the human hao-1 gene
  misc_feature 1..22: note = Description: hH29-38
  source 1..22: mol_type = other DNA
gccacatatgcagcaagtccac

SEQ ID NO: 4222 - DNA, 22 bp, synthetic construct
  misc_feature 1..22: note = Description of Artificial Sequence: Synthetic oligonucleotide
  misc_feature 1..22: note = Category: MG29-1 spacer sequences identified in exons 1 to 4 of the human hao-1 gene
  misc_feature 1..22: note = Description: hH29-39
  source 1..22: mol_type = other DNA
ggagacgacagtggacttgctg

SEQ ID NO: 4223 - DNA, 22 bp, synthetic construct
  misc_feature 1..22: note = Description of Artificial Sequence: Synthetic oligonucleotide
  misc_feature 1..22: note = Category: MG29-1 spacer sequences identified in exons 1 to 4 of the human hao-1 gene
  misc_feature 1..22: note = Description: hH29-40
  source 1..22: mol_type = other DNA
gagacgacagtggacttgctgc

SEQ ID NO: 4224 - DNA, 22 bp, synthetic construct
  misc_feature 1..22: note = Description of Artificial Sequence: Synthetic oligonucleotide
  misc_feature 1..22: note = Category: MG29-1 spacer sequences identified in exons 1 to 4 of the human hao-1 gene
  misc_feature 1..22: note = Description: hH29-41
  source 1..22: mol_type = other DNA
atatcttcccagctgatagatg

SEQ ID NO: 4225 - DNA, 22 bp, synthetic construct
  misc_feature 1..22: note = Description of Artificial Sequence: Synthetic oligonucleotide
  misc_feature 1..22: note = Category: MG29-1 spacer sequences identified in exons 1 to 4 of the human hao-1 gene
  misc_feature 1..22: note = Description: hH29-42
  source 1..22: mol_type = other DNA
caacaattggcaatgatgtcag

SEQ ID NO: 4226-4267 - skipped (42 entries)

SEQ ID NO: 4268 - DNA, 22 bp, synthetic construct
  misc_feature 1..22: note = Description of Artificial Sequence: Synthetic oligonucleotide
  misc_feature 1..22: note = Category: TRAC spacer
  misc_feature 1..22: note = Description: Guide 35 TRAC spacer
  source 1..22: mol_type = other DNA
gagtctctcagctggtacacgg

SEQ ID NO: 4269 - DNA, 20 bp, synthetic construct
  misc_feature 1..20: note = Description of Artificial Sequence: Synthetic oligonucleotide
  misc_feature 1..20: note = Category: Primers
  misc_feature 1..20: note = Description: Primer F
  source 1..20: mol_type = other DNA
tgctttgctgggcctttttc

SEQ ID NO: 4270 - DNA, 20 bp, synthetic construct
  misc_feature 1..20: note = Description of Artificial Sequence: Synthetic oligonucleotide
  misc_feature 1..20: note = Category: Primers
  misc_feature 1..20: note = Description: Primer R
  source 1..20: mol_type = other DNA
acagtctgagcaaaggcagg

SEQ ID NO: 4271 - DNA, 20 bp, synthetic construct
  misc_feature 1..20: note = Description of Artificial Sequence: Synthetic oligonucleotide
  misc_feature 1..20: note = Category: Primers
  misc_feature 1..20: note = Description: Primer for Sanger sequencing
  source 1..20: mol_type = other DNA
atcacgagcagctggtttct

SEQ ID NO: 4272 - RNA, 44 nt, synthetic construct
  misc_feature 1..44: note = Description of Artificial Sequence: Synthetic oligonucleotide
  misc_feature 1..44: note = Category: Chemically modified MG29-1 sgRNA
  misc_feature 1..44: note = Description: mAlb298-0
  source 1..44: mol_type = other RNA
cttaatttctactgttgtagatctgtaacgatcgggaactggca

SEQ ID NO: 4273 - RNA, 44 nt, synthetic construct; identical to SEQ ID NO: 4272
  misc_feature 1..44: note = Description of Artificial Sequence: Synthetic oligonucleotide
  misc_feature 1..44: note = Category: Chemically modified MG29-1 sgRNA
  misc_feature 1..44: note = Description: mAlb298-1
  source 1..44: mol_type = other RNA

SEQ ID NO: 4274 - RNA, 44 nt, synthetic construct; identical to SEQ ID NO: 4272
  misc_feature 1..44: note = Description of Artificial Sequence: Synthetic oligonucleotide
  misc_feature 1..44: note = Category: Chemically modified MG29-1 sgRNA
  misc_feature 1..44: note = Description: mAlb298-2
  source 1..44: mol_type = other RNA

SEQ ID NO: 4275 - RNA, 44 nt, synthetic construct; identical to SEQ ID NO: 4272
  misc_feature 1..44: note = Description of Artificial Sequence: Synthetic oligonucleotide
  misc_feature 1..44: note = Category: Chemically modified MG29-1 sgRNA
  misc_feature 1..44: note = Description: mAlb298-3
  source 1..44: mol_type = other RNA

SEQ ID NO: 4276 - RNA, 44 nt, synthetic construct; identical to SEQ ID NO: 4272
  misc_feature 1..44: note = Description of Artificial Sequence: Synthetic oligonucleotide
  misc_feature 1..44: note = Category: Chemically modified MG29-1 sgRNA
  misc_feature 1..44: note = Description: mAlb298-4
  source 1..44: mol_type = other RNA

SEQ ID NO: 4277 - RNA, 44 nt, synthetic construct; identical to SEQ ID NO: 4272
  misc_feature 1..44: note = Description of Artificial Sequence: Synthetic oligonucleotide
  misc_feature 1..44: note = Category: Chemically modified MG29-1 sgRNA
  misc_feature 1..44: note = Description: mAlb298-5
  source 1..44: mol_type = other RNA

SEQ ID NO: 4278 - RNA, 44 nt, synthetic construct; identical to SEQ ID NO: 4272
  misc_feature 1..44: note = Description of Artificial Sequence: Synthetic oligonucleotide
  misc_feature 1..44: note = Category: Chemically modified MG29-1 sgRNA
  misc_feature 1..44: note = Description: mAlb298-6
  source 1..44: mol_type = other RNA

SEQ ID NO: 4279 - RNA, 44 nt, synthetic construct; identical to SEQ ID NO: 4272
  misc_feature 1..44: note = Description of Artificial Sequence: Synthetic oligonucleotide
  misc_feature 1..44: note = Category: Chemically modified MG29-1 sgRNA
  misc_feature 1..44: note = Description: mAlb298-7
  source 1..44: mol_type = other RNA

SEQ ID NO: 4280 - RNA, 44 nt, synthetic construct; identical to SEQ ID NO: 4272
  misc_feature 1..44: note = Description of Artificial Sequence: Synthetic oligonucleotide
  misc_feature 1..44: note = Category: Chemically modified MG29-1 sgRNA
  misc_feature 1..44: note = Description: mAlb298-8
  source 1..44: mol_type = other RNA

SEQ ID NO: 4281 - RNA, 44 nt, synthetic construct; identical to SEQ ID NO: 4272
  misc_feature 1..44: note = Description of Artificial Sequence: Synthetic oligonucleotide
  misc_feature 1..44: note = Category: Chemically modified MG29-1 sgRNA
  misc_feature 1..44: note = Description: mAlb298-9
  source 1..44: mol_type = other RNA

SEQ ID NO: 4282 - RNA, 44 nt, synthetic construct; identical to SEQ ID NO: 4272
  misc_feature 1..44: note = Description of Artificial Sequence: Synthetic oligonucleotide
  misc_feature 1..44: note = Category: Chemically modified MG29-1 sgRNA
  misc_feature 1..44: note = Description: mAlb298-10
  source 1..44: mol_type = other RNA

SEQ ID NO: 4283 - RNA, 44 nt, synthetic construct; identical to SEQ ID NO: 4272
  misc_feature 1..44: note = Description of Artificial Sequence: Synthetic oligonucleotide
  misc_feature 1..44: note = Category: Chemically modified MG29-1 sgRNA
  misc_feature 1..44: note = Description: mAlb298-11
  source 1..44: mol_type = other RNA

SEQ ID NO: 4284 - RNA, 44 nt, synthetic construct; identical to SEQ ID NO: 4272
  misc_feature 1..44: note = Description of Artificial Sequence: Synthetic oligonucleotide
  misc_feature 1..44: note = Category: Chemically modified MG29-1 sgRNA
  misc_feature 1..44: note = Description: mAlb298-12
  source 1..44: mol_type = other RNA

SEQ ID NO: 4285 - RNA, 44 nt, synthetic construct; identical to SEQ ID NO: 4272
  misc_feature 1..44: note = Description of Artificial Sequence: Synthetic oligonucleotide
  misc_feature 1..44: note = Category: Chemically modified MG29-1 sgRNA
  misc_feature 1..44: note = Description: mAlb298-13
  source 1..44: mol_type = other RNA

SEQ ID NO: 4286 - RNA, 44 nt, synthetic construct; identical to SEQ ID NO: 4272
  misc_feature 1..44: note = Description of Artificial Sequence: Synthetic oligonucleotide
  misc_feature 1..44: note = Category: Chemically modified MG29-1 sgRNA
  misc_feature 1..44: note = Description: mAlb298-14
  source 1..44: mol_type = other RNA

SEQ ID NO: 4287 - RNA, 44 nt, synthetic construct; identical to SEQ ID NO: 4272
  misc_feature 1..44: note = Description of Artificial Sequence: Synthetic oligonucleotide
  misc_feature 1..44: note = Category: Chemically modified MG29-1 sgRNA
  misc_feature 1..44: note = Description: mAlb298-15
  source 1..44: mol_type = other RNA

SEQ ID NO: 4288 - RNA, 44 nt, synthetic construct; identical to SEQ ID NO: 4272
  misc_feature 1..44: note = Description of Artificial Sequence: Synthetic oligonucleotide
  misc_feature 1..44: note = Category: Chemically modified MG29-1 sgRNA
  misc_feature 1..44: note = Description: mAlb298-16
  source 1..44: mol_type = other RNA

SEQ ID NO: 4289 - RNA, 44 nt, synthetic construct; identical to SEQ ID NO: 4272
  misc_feature 1..44: note = Description of Artificial Sequence: Synthetic oligonucleotide
  misc_feature 1..44: note = Category: Chemically modified MG29-1 sgRNA
  misc_feature 1..44: note = Description: mAlb298-17
  source 1..44: mol_type = other RNA

SEQ ID NO: 4290 - RNA, 44 nt, synthetic construct; identical to SEQ ID NO: 4272
  misc_feature 1..44: note = Description of Artificial Sequence: Synthetic oligonucleotide
  misc_feature 1..44: note = Category: Chemically modified MG29-1 sgRNA
  misc_feature 1..44: note = Description: mAlb298-18
  source 1..44: mol_type = other RNA

SEQ ID NO: 4291 - RNA, 48 nt, synthetic construct
  misc_feature 1..48: note = Description of Artificial Sequence: Synthetic oligonucleotide
  misc_feature 1..48: note = Category: Chemically modified MG29-1 sgRNA
  misc_feature 1..48: note = Description: mAlb298-19
  source 1..48: mol_type = other RNA
gtagcttaatttctactgttgtagatctgtaacgatcgggaactggca

SEQ ID NO: 4292 - RNA, 44 nt, synthetic construct; identical to SEQ ID NO: 4272
  misc_feature 1..44: note = Description of Artificial Sequence: Synthetic oligonucleotide
  misc_feature 1..44: note = Category: Chemically modified MG29-1 sgRNA
  misc_feature 1..44: note = Description: mAlb298-20
  source 1..44: mol_type = other RNA

SEQ ID NO: 4293 - RNA, 44 nt, synthetic construct; identical to SEQ ID NO: 4272
  misc_feature 1..44: note = Description of Artificial Sequence: Synthetic oligonucleotide
  misc_feature 1..44: note = Category: Chemically modified MG29-1 sgRNA
  misc_feature 1..44: note = Description: mAlb298-21
  source 1..44: mol_type = other RNA

SEQ ID NO: 4294 - RNA, 44 nt, synthetic construct; identical to SEQ ID NO: 4272
  misc_feature 1..44: note = Description of Artificial Sequence: Synthetic oligonucleotide
  misc_feature 1..44: note = Category: Chemically modified MG29-1 sgRNA
  misc_feature 1..44: note = Description: mAlb298-22
  source 1..44: mol_type = other RNA

SEQ ID NO: 4295 - RNA, 44 nt, synthetic construct; identical to SEQ ID NO: 4272
  misc_feature 1..44: note = Description of Artificial Sequence: Synthetic oligonucleotide
  misc_feature 1..44: note = Category: Chemically modified MG29-1 sgRNA
  misc_feature 1..44: note = Description: mAlb298-23
  source 1..44: mol_type = other RNA

SEQ ID NO: 4296 - RNA, 44 nt, synthetic construct; identical to SEQ ID NO: 4272
  misc_feature 1..44: note = Description of Artificial Sequence: Synthetic oligonucleotide
  misc_feature 1..44: note = Category: Chemically modified MG29-1 sgRNA
  misc_feature 1..44: note = Description: mAlb298-24
  source 1..44: mol_type = other RNA

SEQ ID NO: 4297 - RNA, 44 nt, synthetic construct; identical to SEQ ID NO: 4272
  misc_feature 1..44: note = Description of Artificial Sequence: Synthetic oligonucleotide
  misc_feature 1..44: note = Category: Chemically modified MG29-1 sgRNA
  misc_feature 1..44: note = Description: mAlb298-25
  source 1..44: mol_type = other RNA

SEQ ID NO: 4298 - RNA, 44 nt, synthetic construct; identical to SEQ ID NO: 4272
  misc_feature 1..44: note = Description of Artificial Sequence: Synthetic oligonucleotide
  misc_feature 1..44: note = Category: Chemically modified MG29-1 sgRNA
  misc_feature 1..44: note = Description: mAlb298-26
  source 1..44: mol_type = other RNA

SEQ ID NO: 4299 - RNA, 46 nt, synthetic construct
  misc_feature 1..46: note = Description of Artificial Sequence: Synthetic oligonucleotide
  misc_feature 1..46: note = Category: Chemically modified MG29-1 sgRNA
  misc_feature 1..46: note = Description: mAlb298-27
  source 1..46: mol_type = other RNA
cttttaatttctactgttgtagatctgtaacgatcgggaactggca

SEQ ID NO: 4300 - RNA, 46 nt, synthetic construct; identical to SEQ ID NO: 4299
  misc_feature 1..46: note = Description of Artificial Sequence: Synthetic oligonucleotide
  misc_feature 1..46: note = Category: Chemically modified MG29-1 sgRNA
  misc_feature 1..46: note = Description: mAlb298-28
  source 1..46: mol_type = other RNA

SEQ ID NO: 4301 - RNA, 46 nt, synthetic construct; identical to SEQ ID NO: 4299
  misc_feature 1..46: note = Description of Artificial Sequence: Synthetic oligonucleotide
  misc_feature 1..46: note = Category: Chemically modified MG29-1 sgRNA
  misc_feature 1..46: note = Description: mAlb298-29
  source 1..46: mol_type = other RNA

SEQ ID NO: 4302 - RNA, 46 nt, synthetic construct; identical to SEQ ID NO: 4299
  misc_feature 1..46: note = Description of Artificial Sequence: Synthetic oligonucleotide
  misc_feature 1..46: note = Category: Chemically modified MG29-1 sgRNA
  misc_feature 1..46: note = Description: mAlb298-30
  source 1..46: mol_type = other RNA

SEQ ID NO: 4303 - RNA, 44 nt, synthetic construct; identical to SEQ ID NO: 4272
  misc_feature 1..44: note = Description of Artificial Sequence: Synthetic oligonucleotide
  misc_feature 1..44: note = Category: Chemically modified MG29-1 sgRNA
  misc_feature 1..44: note = Description: mAlb298-31
  source 1..44: mol_type = other RNA

SEQ ID NO: 4304 - RNA, 44 nt, synthetic construct; identical to SEQ ID NO: 4272
  misc_feature 1..44: note = Description of Artificial Sequence: Synthetic oligonucleotide
  misc_feature 1..44: note = Category: Chemically modified MG29-1 sgRNA
  misc_feature 1..44: note = Description: mAlb298-32
  source 1..44: mol_type = other RNA

SEQ ID NO: 4305 - RNA, 44 nt, synthetic construct; identical to SEQ ID NO: 4272
  misc_feature 1..44: note = Description of Artificial Sequence: Synthetic oligonucleotide
  misc_feature 1..44: note = Category: Chemically modified MG29-1 sgRNA
  misc_feature 1..44: note = Description: mAlb298-33
  source 1..44: mol_type = other RNA

SEQ ID NO: 4306 - RNA, 44 nt, synthetic construct; identical to SEQ ID NO: 4272
  misc_feature 1..44: note = Description of Artificial Sequence: Synthetic oligonucleotide
  misc_feature 1..44: note = Category: Chemically modified MG29-1 sgRNA
  misc_feature 1..44: note = Description: mAlb298-34
  source 1..44: mol_type = other RNA

SEQ ID NO: 4307 - RNA, 44 nt, synthetic construct; identical to SEQ ID NO: 4272
  misc_feature 1..44: note = Description of Artificial Sequence: Synthetic oligonucleotide
  misc_feature 1..44: note = Category: Chemically modified MG29-1 sgRNA
  misc_feature 1..44: note = Description: mAlb298-35
  source 1..44: mol_type = other RNA

SEQ ID NO: 4308 - RNA, 44 nt, synthetic construct; identical to SEQ ID NO: 4272
  misc_feature 1..44: note = Description of Artificial Sequence: Synthetic oligonucleotide
  misc_feature 1..44: note = Category: Chemically modified MG29-1 sgRNA
  misc_feature 1..44: note = Description: mAlb298-36
  source 1..44: mol_type = other RNA

SEQ ID NO: 4309 - RNA, 46 nt, synthetic construct; identical to SEQ ID NO: 4299
  misc_feature 1..46: note = Description of Artificial Sequence: Synthetic oligonucleotide
  misc_feature 1..46: note = Category: Chemically modified MG29-1 sgRNA
  misc_feature 1..46: note = Description: mAlb298-37
  source 1..46: mol_type = other RNA

SEQ ID NO: 4310 - RNA, 46 nt, synthetic construct; identical to SEQ ID NO: 4299
  misc_feature 1..46: note = Description of Artificial Sequence: Synthetic oligonucleotide
  misc_feature 1..46: note = Category: Chemically modified MG29-1 sgRNA
  misc_feature 1..46: note = Description: mAlb298-38
  source 1..46: mol_type = other RNA

SEQ ID NO: 4311 - RNA, 46 nt, synthetic construct; identical to SEQ ID NO: 4299
  misc_feature 1..46: note = Description of Artificial Sequence: Synthetic oligonucleotide
  misc_feature 1..46: note = Category: Chemically modified MG29-1 sgRNA
  misc_feature 1..46: note = Description: mAlb298-39
  source 1..46: mol_type = other RNA

SEQ ID NO: 4312 - RNA, 46 nt, synthetic construct; identical to SEQ ID NO: 4299
  misc_feature 1..46: note = Description of Artificial Sequence: Synthetic oligonucleotide
  misc_feature 1..46: note = Category: Chemically modified MG29-1 sgRNA
  misc_feature 1..46: note = Description: mAlb298-40
  source 1..46: mol_type = other RNA

SEQ ID NO: 4313 - DNA, 46 bp, synthetic construct
  misc_feature 1..46: note = Description of Artificial Sequence: Synthetic oligonucleotide
  misc_feature 1..46: note = Category: Chemically modified MG29-1 sgRNA
  misc_feature 1..46: note = Description: mAlb298-41
  source 1..46: mol_type = other DNA
  misc_feature 1..18: note = RNA
  misc_feature 19..24: note = DNA
  misc_feature 25..46: note = RNA
cttttaatttctactgttgtagatctgtaacgatcgggaactggca

SEQ ID NO: 4314 - RNA, 46 nt, synthetic construct; identical to SEQ ID NO: 4299
  misc_feature 1..46: note = Description of Artificial Sequence: Synthetic oligonucleotide
  misc_feature 1..46: note = Category: Chemically modified MG29-1 sgRNA
  misc_feature 1..46: note = Description: mAlb298-42
  source 1..46: mol_type = other RNA

SEQ ID NO: 4315 - RNA, 46 nt, synthetic construct; identical to SEQ ID NO: 4299
  misc_feature 1..46: note = Description of Artificial Sequence: Synthetic oligonucleotide
  misc_feature 1..46: note = Category: Chemically modified MG29-1 sgRNA
  misc_feature 1..46: note = Description: mAlb298-43
  source 1..46: mol_type = other RNA

SEQ ID NO: 4316 - DNA, 22 bp, synthetic construct
  misc_feature 1..22: note = Description of Artificial Sequence: Synthetic oligonucleotide
  misc_feature 1..22: note = Category: MG29-1 TRAC Guides
  misc_feature 1..22: note = Description: MG29-1 Guide 1 Target Sequence
  source 1..22: mol_type = other DNA
accgattttgattctcaaacaa

SEQ ID NO: 4317 - DNA, 22 bp, synthetic construct
  misc_feature 1..22: note = Description of Artificial Sequence: Synthetic oligonucleotide
  misc_feature 1..22: note = Category: MG29-1 TRAC Guides
  misc_feature 1..22: note = Description: MG29-1 Guide 2 Target Sequence
  source 1..22: mol_type = other DNA
tgattctcaaacaaatgtgtca

SEQ ID NO: 4318 - DNA, 22 bp, synthetic construct
  misc_feature 1..22: note = Description of Artificial Sequence: Synthetic oligonucleotide
  misc_feature 1..22: note = Category: MG29-1 TRAC Guides
  misc_feature 1..22: note = Description: MG29-1 Guide 3 Target Sequence
  source 1..22: mol_type = other DNA
gattctcaaacaaatgtgtcac

SEQ ID NO: 4319 - DNA, 22 bp, synthetic construct
  misc_feature 1..22: note = Description of Artificial Sequence: Synthetic oligonucleotide
  misc_feature 1..22: note = Category: MG29-1 TRAC Guides
  misc_feature 1..22: note = Description: MG29-1 Guide 4 Target Sequence
  source 1..22: mol_type = other DNA
attctcaaacaaatgtgtcaca

SEQ ID NO: 4320 - DNA, 22 bp, synthetic construct
  misc_feature 1..22: note = Description of Artificial Sequence: Synthetic oligonucleotide
  misc_feature 1..22: note = Category: MG29-1 TRAC Guides
  misc_feature 1..22: note = Description: MG29-1 Guide 5 Target Sequence
  source 1..22: mol_type = other DNA
tcaaacaaatgtgtcacaaagt

SEQ ID NO: 4321 - DNA, 22 bp, synthetic construct
  misc_feature 1..22: note = Description of Artificial Sequence: Synthetic oligonucleotide
  misc_feature 1..22: note = Category: MG29-1 TRAC Guides
  misc_feature 1..22: note = Description: MG29-1 Guide 6 Target Sequence
  source 1..22: mol_type = other DNA
tgatgtgtatatcacagacaaa

SEQ ID NO: 4322 - DNA, 22 bp, synthetic construct
  misc_feature 1..22: note = Description of Artificial Sequence: Synthetic oligonucleotide
  misc_feature 1..22: note = Category: MG29-1 TRAC Guides
  misc_feature 1..22: note = Description: MG29-1 Guide 7 Target Sequence
  source 1..22: mol_type = other DNA
aagagcaacagtgctgtggcct

SEQ ID NO: 4323 - DNA, 22 bp, synthetic construct
  misc_feature 1..22: note = Description of Artificial Sequence: Synthetic oligonucleotide
  misc_feature 1..22: note = Category: MG29-1 TRAC Guides
  misc_feature 1..22: note = Description: MG29-1 Guide 8 Target Sequence
  source 1..22: mol_type = other DNA
gcatgtgcaaacgccttcaaca

SEQ ID NO: 4324 - DNA, 22 bp, synthetic construct
  misc_feature 1..22: note = Description of Artificial Sequence: Synthetic oligonucleotide
  misc_feature 1..22: note = Category: MG29-1 TRAC Guides
  misc_feature 1..22: note = Description: MG29-1 Guide 9 Target Sequence
  source 1..22: mol_type = other DNA
catgtgcaaacgccttcaacaa

SEQ ID NO: 4325 - DNA, 22 bp, synthetic construct
  misc_feature 1..22: note = Description of Artificial Sequence: Synthetic oligonucleotide
  misc_feature 1..22: note = Category: MG29-1 TRAC Guides
  misc_feature 1..22: note = Description: MG29-1 Guide 10 Target Sequence
  source 1..22: mol_type = other DNA
aacaacagcattattccagaag

SEQ ID NO: 4326 - DNA, 22 bp, synthetic construct
  misc_feature 1..22: note = Description of Artificial Sequence: Synthetic oligonucleotide
  misc_feature 1..22: note = Category: MG29-1 TRAC Guides
  misc_feature 1..22: note = Description: MG29-1 Guide 11 Target Sequence
  source 1..22: mol_type = other DNA
ttccagaagacaccttcttccc

SEQ ID NO: 4327 - DNA, 22 bp, synthetic construct
  misc_feature 1..22: note = Description of Artificial Sequence: Synthetic oligonucleotide
  misc_feature 1..22: note = Category: MG29-1 TRAC Guides
  misc_feature 1..22: note = Description: MG29-1 Guide 12 Target Sequence
  source 1..22: mol_type = other DNA
cagaagacaccttcttccccag

SEQ ID NO: 4328 - DNA, 22 bp, synthetic construct
  misc_feature 1..22: note = Description of Artificial Sequence: Synthetic oligonucleotide
  misc_feature 1..22: note = Category: MG29-1 TRAC Guides
  misc_feature 1..22: note = Description: MG29-1 Guide 13 Target Sequence
  source 1..22: mol_type = other DNA
tggaataatgctgttgttgaag

SEQ ID NO: 4329 - DNA, 22 bp, synthetic construct
  misc_feature 1..22: note = Description of Artificial Sequence: Synthetic oligonucleotide
  misc_feature 1..22: note = Category: MG29-1 TRAC Guides
  misc_feature 1..22: note = Description: MG29-1 Guide 14 Target Sequence
  source 1..22: mol_type = other DNA
ttgaaggcgtttgcacatgcaa

SEQ ID NO: 4330 - DNA, 22 bp, synthetic construct
  misc_feature 1..22: note = Description of Artificial Sequence: Synthetic oligonucleotide
  misc_feature 1..22: note = Category: MG29-1 TRAC Guides
  misc_feature 1..22: note = Description: MG29-1 Guide 15 Target Sequence
  source 1..22: mol_type = other DNA
aaggcgtttgcacatgcaaagt

SEQ ID NO: 4331 - DNA, 22 bp, synthetic construct
  misc_feature 1..22: note = Description of Artificial Sequence: Synthetic oligonucleotide
  misc_feature 1..22: note = Category: MG29-1 TRAC Guides
  misc_feature 1..22: note = Description: MG29-1 Guide 16 Target Sequence
  source 1..22: mol_type = other DNA
gcacatgcaaagtcagatttgt

SEQ ID NO: 4332 - DNA, 22 bp, synthetic construct
  misc_feature 1..22: note = Description of Artificial Sequence: Synthetic oligonucleotide
  misc_feature 1..22: note = Category: MG29-1 TRAC Guides
  misc_feature 1..22: note = Description: MG29-1 Guide 17 Target Sequence
  source 1..22: mol_type = other DNA
cacatgcaaagtcagatttgtt

SEQ ID NO: 4333 - DNA, 22 bp, synthetic construct
  misc_feature 1..22: note = Description of Artificial Sequence: Synthetic oligonucleotide
  misc_feature 1..22: note = Category: MG29-1 TRAC Guides
  misc_feature 1..22: note = Description: MG29-1 Guide 18 Target Sequence
  source 1..22: mol_type = other DNA
gttgctccaggccacagcactg

SEQ ID NO: 4334 - DNA, 22 bp, synthetic construct
  misc_feature 1..22: note = Description of Artificial Sequence: Synthetic oligonucleotide
  misc_feature 1..22: note = Category: MG29-1 TRAC Guides
  misc_feature 1..22: note = Description: MG29-1 Guide 19 Target Sequence
  source 1..22: mol_type = other DNA
ttgctccaggccacagcactgt

SEQ ID NO: 4335 - DNA, 22 bp, synthetic construct
  misc_feature 1..22: note = Description of Artificial Sequence: Synthetic oligonucleotide
  misc_feature 1..22: note = Category: MG29-1 TRAC Guides
  misc_feature 1..22: note = Description: MG29-1 Guide 20 Target Sequence
  source 1..22: mol_type = other DNA
ctccaggccacagcactgttgc

SEQ ID NO: 4336 - DNA, 22 bp, synthetic construct
  misc_feature 1..22: note = Description of Artificial Sequence: Synthetic oligonucleotide
  misc_feature 1..22: note = Category: MG29-1 TRAC Guides
  misc_feature 1..22: note = Description: MG29-1 Guide 21 Target Sequence
  source 1..22: mol_type = other DNA
ctcttgaagtccatagacctca

SEQ ID NO: 4337 - DNA, 22 bp, synthetic construct
  misc_feature 1..22: note = Description of Artificial Sequence: Synthetic oligonucleotide
  misc_feature 1..22: note = Category: MG29-1 TRAC Guides
  misc_feature 1..22: note = Description: MG29-1 Guide 22 Target Sequence
  source 1..22: mol_type = other DNA
aagtccatagacctcatgtcta

SEQ ID NO: 4338 - DNA, 22 bp, synthetic construct
  misc_feature 1..22: note = Description of Artificial Sequence: Synthetic oligonucleotide
  misc_feature 1..22: note = Category: MG29-1 TRAC Guides
  misc_feature 1..22: note = Description: MG29-1 Guide 23 Target Sequence
  source 1..22: mol_type = other DNA
tgtctgtgatatacacatcaga

SEQ ID NO: 4339 - DNA, 22 bp, synthetic construct
  misc_feature 1..22: note = Description of Artificial Sequence: Synthetic oligonucleotide
  misc_feature 1..22: note = Category: MG29-1 TRAC Guides
  misc_feature 1..22: note = Description: MG29-1 Guide 24 Target Sequence
  source 1..22: mol_type = other DNA
gtctgtgatatacacatcagaa

SEQ ID NO: 4340 - DNA, 22 bp, synthetic construct
  misc_feature 1..22: note = Description of Artificial Sequence: Synthetic oligonucleotide
  misc_feature 1..22: note = Category: MG29-1 TRAC Guides
  misc_feature 1..22: note = Description: MG29-1 Guide 25 Target Sequence
  source 1..22: mol_type = other DNA
tctgtgatatacacatcagaat

SEQ ID NO: 4341 - DNA, 22 bp, synthetic construct
  misc_feature 1..22: note = Description of Artificial Sequence: Synthetic oligonucleotide
  misc_feature 1..22: note = Category: MG29-1 TRAC Guides
  misc_feature 1..22: note = Description: MG29-1 Guide 26 Target Sequence
  source 1..22: mol_type = other DNA
ctttgtgacacatttgtttgag

SEQ ID NO: 4342 - DNA, 22 bp, synthetic construct
  misc_feature 1..22: note = Description of Artificial Sequence: Synthetic oligonucleotide
  misc_feature 1..22: note = Category: MG29-1 TRAC Guides
  misc_feature 1..22: note = Description: MG29-1 Guide 27 Target Sequence
  source 1..22: mol_type = other DNA
gtgacacatttgtttgagaatc

SEQ ID NO: 4343 - DNA, 22 bp, synthetic construct
  misc_feature 1..22: note = Description of Artificial Sequence: Synthetic oligonucleotide
  misc_feature 1..22: note = Category: MG29-1 TRAC Guides
  misc_feature 1..22: note = Description: MG29-1 Guide 28 Target Sequence
  source 1..22: mol_type = other DNA
tgacacatttgtttgagaatca

SEQ ID NO: 4344 - DNA, 22 bp, synthetic construct
  misc_feature 1..22: note = Description of Artificial Sequence: Synthetic oligonucleotide
  misc_feature 1..22: note = Category: MG29-1 TRAC Guides
  misc_feature 1..22: note = Description: MG29-1 Guide 29 Target Sequence
  source 1..22: mol_type = other DNA
gtttgagaatcaaaatcggtga

SEQ ID NO: 4345 - DNA, 22 bp, synthetic construct
  misc_feature 1..22: note = Description of Artificial Sequence: Synthetic oligonucleotide
  misc_feature 1..22: note = Category: MG29-1 TRAC Guides
  misc_feature 1..22: note = Description: MG29-1 Guide 30 Target Sequence
  source 1..22: mol_type = other DNA
tttgagaatcaaaatcggtgaa

SEQ ID NO: 4346 - DNA, 22 bp, synthetic construct
  misc_feature 1..22: note = Description of Artificial Sequence: Synthetic oligonucleotide
  misc_feature 1..22: note = Category: MG29-1 TRAC Guides
  misc_feature 1..22: note = Description: MG29-1 Guide 31 Target Sequence
  source 1..22: mol_type = other DNA
gagaatcaaaatcggtgaatag

SEQ ID NO: 4347 - DNA, 22 bp, synthetic construct
  misc_feature 1..22: note = Description of Artificial Sequence: Synthetic oligonucleotide
  misc_feature 1..22: note = Category: MG29-1 TRAC Guides
  misc_feature 1..22: note = Description: MG29-1 Guide 32 Target Sequence
  source 1..22: mol_type = other DNA
agaatcaaaatcggtgaatagg

SEQ ID NO: 4348 - DNA, 22 bp, synthetic construct
  misc_feature 1..22: note = Description of Artificial Sequence: Synthetic oligonucleotide
  misc_feature 1..22: note = Category: MG29-1 TRAC Guides
  misc_feature 1..22: note = Description: MG29-1 Guide 33 Target Sequence
  source 1..22: mol_type = other DNA
tcactggatttagagtctctca

SEQ ID NO: 4349 - DNA, 22 bp, synthetic construct
  misc_feature 1..22: note = Description of Artificial Sequence: Synthetic oligonucleotide
  misc_feature 1..22: note = Category: MG29-1 TRAC Guides
  misc_feature 1..22: note = Description: MG29-1 Guide 34 Target Sequence
  source 1..22: mol_type = other DNA
agagtctctcagctggtacacg

SEQ ID NO: 4350 - DNA, 22 bp, synthetic construct
  misc_feature 1..22: note = Description of Artificial Sequence: Synthetic oligonucleotide
  misc_feature 1..22: note = Category: MG29-1 TRAC Guides
  misc_feature 1..22: note = Description: MG29-1 Guide 35 Target Sequence
  source 1..22: mol_type = other DNA
gagtctctcagctggtacacgg

SEQ ID NO: 4351 - DNA, 22 bp, synthetic construct
  misc_feature 1..22: note = Description of Artificial Sequence: Synthetic oligonucleotide
  misc_feature 1..22: note = Category: MG29-1 TRAC Guides
  misc_feature 1..22: note = Description: MG29-1 Guide 36 Target Sequence
  source 1..22: mol_type = other DNA
ctgtgatgtcaagctggtcgag

SEQ ID NO: 4352 - DNA, 22 bp, synthetic construct
  misc_feature 1..22: note = Description of Artificial Sequence: Synthetic oligonucleotide
  misc_feature 1..22: note = Category: MG29-1 TRAC Guides
  misc_feature 1..22: note = Description: MG29-1 Guide 37 Target Sequence
  source 1..22: mol_type = other DNA
caaagcttttctcgaccagctt

SEQ ID NO: 4353 - DNA, 22 bp, synthetic construct
  misc_feature 1..22: note = Description of Artificial Sequence: Synthetic oligonucleotide
  misc_feature 1..22: note = Category: MG29-1 TRAC Guides
  misc_feature 1..22: note = Description: MG29-1 Guide 38 Target Sequence
  source 1..22: mol_type = other DNA
aaagcttttctcgaccagcttg

SEQ ID NO: 4354 - DNA, 22 bp, synthetic construct
  misc_feature 1..22: note = Description of Artificial Sequence: Synthetic oligonucleotide
  misc_feature 1..22: note = Category: MG29-1 TRAC Guides
  misc_feature 1..22: note = Description: MG29-1 Guide 39 Target Sequence
  source 1..22: mol_type = other DNA
tctcgaccagcttgacatcaca

SEQ ID NO: 4355 - DNA, 22 bp, synthetic construct
  misc_feature 1..22: note = Description of Artificial Sequence: Synthetic oligonucleotide
  misc_feature 1..22: note = Category: MG29-1 TRAC Guides
  misc_feature 1..22: note = Description: MG29-1 Guide 40 Target Sequence
  source 1..22: mol_type = other DNA
ctcgaccagcttgacatcacag

SEQ ID NO: 4356 - DNA, 22 bp, synthetic construct
  misc_feature 1..22: note = Description of Artificial Sequence: Synthetic oligonucleotide
  misc_feature 1..22: note = Category: MG29-1 TRAC Guides
  misc_feature 1..22: note = Description: MG29-1 Guide 41 Target Sequence
  source 1..22: mol_type = other DNA
tcgaccagcttgacatcacagg

SEQ ID NO: 4357 - DNA, 22 bp, synthetic construct
  misc_feature 1..22: note = Description of Artificial Sequence: Synthetic oligonucleotide
  misc_feature 1..22: note = Category: MG29-1 TRAC Guides
  misc_feature 1..22: note = Description: MG29-1 Guide 42 Target Sequence
  source 1..22: mol_type = other DNA
caaaacctgtcagtgattgggt

SEQ ID NO: 4358 - DNA, 22 bp, synthetic construct
  misc_feature 1..22: note = Description of Artificial Sequence: Synthetic oligonucleotide
  misc_feature 1..22: note = Category: MG29-1 TRAC Guides
  misc_feature 1..22: note = Description: MG29-1 Guide 43 Target Sequence
  source 1..22: mol_type = other DNA
aaaacctgtcagtgattgggtt

SEQ ID NO: 4359 - DNA, 22 bp, synthetic construct
  misc_feature 1..22: note = Description of Artificial Sequence: Synthetic oligonucleotide
  misc_feature 1..22: note = Category: MG29-1 TRAC Guides
  misc_feature 1..22: note = Description: MG29-1 Guide 44 Target Sequence
  source 1..22: mol_type = other DNA
ggttccgaatcctcctcctgaa

SEQ ID NO: 4360 - DNA, 22 bp, synthetic construct
  misc_feature 1..22: note = Description of Artificial Sequence: Synthetic oligonucleotide
  misc_feature 1..22: note = Category: MG29-1 TRAC Guides
  misc_feature 1..22: note = Description: MG29-1 Guide 45 Target Sequence
  source 1..22: mol_type = other DNA
cgaatcctcctcctgaaagtgg

SEQ ID NO: 4361 - DNA, 22 bp, synthetic construct
  misc_feature 1..22: note = Description of Artificial Sequence: Synthetic oligonucleotide
  misc_feature 1..22: note = Category: MG29-1 TRAC Guides
  misc_feature 1..22: note = Description: MG29-1 Guide 46 Target Sequence
  source 1..22: mol_type = other DNA
aatctgctcatgacgctgcggc

SEQ ID NO: 4362 - DNA, 22 bp, synthetic construct
  misc_feature 1..22: note = Description of Artificial Sequence: Synthetic oligonucleotide
  misc_feature 1..22: note = Category: MG29-1 TRAC Guides
  misc_feature 1..22: note = Description: MG29-1 Guide 47 Target Sequence
  source 1..22: mol_type = other DNA
atctgctcatgacgctgcggct

SEQ ID NO: 4363 - DNA, 22 bp, synthetic construct
  misc_feature 1..22: note = Description of Artificial Sequence: Synthetic oligonucleotide
  misc_feature 1..22: note = Category: MG29-1 TRAC Guides
  misc_feature 1..22: note = Description: MG29-1 Guide 48 Target Sequence
  source 1..22: mol_type = other DNA
aacccggccactttcaggagga

SEQ ID NO: 4364 - DNA, 22 bp, synthetic construct
  misc_feature 1..22: note = Description of Artificial Sequence: Synthetic oligonucleotide
  misc_feature 1..22: note = Category: MG29-1 TRAC Guides
  misc_feature 1..22: note = Description: MG29-1 Guide 49 Target Sequence
  source 1..22: mol_type = other DNA
caggaggaggattcggaaccca

SEQ ID NO: 4365 - DNA, 22 bp, synthetic construct
  misc_feature 1..22: note = Description of Artificial Sequence: Synthetic oligonucleotide
  misc_feature 1..22: note = Category: MG29-1 TRAC Guides
  misc_feature 1..22: note = Description: MG29-1 Guide 50 Target Sequence
  source 1..22: mol_type = other DNA
aggaggaggattcggaacccaa

SEQ ID NO: 4366 - DNA, 22 bp, synthetic construct
  misc_feature 1..22: note = Description of Artificial Sequence: Synthetic oligonucleotide
  misc_feature 1..22: note = Category: MG29-1 TRAC Guides
  misc_feature 1..22: note = Description: MG29-1 Guide 51 Target Sequence
  source 1..22: mol_type = other DNA
ggaacccaatcactgacaggtt

SEQ ID NO: 4367 - DNA, 22 bp, synthetic construct
  misc_feature 1..22: note = Description of Artificial Sequence: Synthetic oligonucleotide
  misc_feature 1..22: note = Category: MG29-1 TRAC Guides
  misc_feature 1..22: note = Description: MG29-1 Guide 52 Target Sequence
  source 1..22: mol_type = other DNA
tgaaagtttaggttcgtatctg

SEQ ID NO: 4368 - DNA, 22 bp, synthetic construct
  misc_feature 1..22: note = Description of Artificial Sequence: Synthetic oligonucleotide
  misc_feature 1..22: note = Category: MG29-1 TRAC Guides
  misc_feature 1..22: note = Description: MG29-1 Guide 53 Target Sequence
  source 1..22: mol_type = other DNA
gaaagtttaggttcgtatctgt

SEQ ID NO: 4369 - DNA, 22 bp, synthetic construct
  misc_feature 1..22: note = Description of Artificial Sequence: Synthetic oligonucleotide
  misc_feature 1..22: note = Category: MG29-1 TRAC Guides
  misc_feature 1..22: note = Description: MG29-1 Guide 54 Target Sequence
  source 1..22: mol_type = other DNA
aaagtttaggttcgtatctgta

SEQ ID NO: 4370 - RNA, 42 nt, synthetic construct
  misc_feature 1..42: note = Description of Artificial Sequence: Synthetic oligonucleotide
  misc_feature 1..42: note = Category: MG29-1 TRAC Guides
  misc_feature 1..42: note = Description: MG29-1 Guide 1 sgRNA synthesized
  source 1..42: mol_type = other RNA
taatttctactgttgtagataccgattttgattctcaaacaa

SEQ ID NO: 4371 - RNA, 42 nt, synthetic construct
  misc_feature 1..42: note = Description of Artificial Sequence: Synthetic oligonucleotide
  misc_feature 1..42: note = Category: MG29-1 TRAC Guides
  misc_feature 1..42: note = Description: MG29-1 Guide 2 sgRNA synthesized
  source 1..42: mol_type = other RNA
taatttctactgttgtagattgattctcaaacaaatgtgtca

SEQ ID NO: 4372 - RNA, 42 nt, synthetic construct
  misc_feature 1..42: note = Description of Artificial Sequence: Synthetic oligonucleotide
  misc_feature 1..42: note = Category: MG29-1 TRAC Guides
  misc_feature 1..42: note = Description: MG29-1 Guide 3 sgRNA synthesized
  source 1..42: mol_type = other RNA
taatttctactgttgtagatgattctcaaacaaatgtgtcac

SEQ ID NO: 4373 - RNA, 42 nt, synthetic construct
  misc_feature 1..42: note = Description of Artificial Sequence: Synthetic oligonucleotide
  misc_feature 1..42: note = Category: MG29-1 TRAC Guides
  misc_feature 1..42: note = Description: MG29-1 Guide 4 sgRNA synthesized
  source 1..42: mol_type = other RNA
taatttctactgttgtagatattctcaaacaaatgtgtcaca

SEQ ID NO: 4374 - RNA, 42 nt, synthetic construct
  misc_feature 1..42: note = Description of Artificial Sequence: Synthetic oligonucleotide
  misc_feature 1..42: note = Category: MG29-1 TRAC Guides
  misc_feature 1..42: note = Description: MG29-1 Guide 5 sgRNA synthesized
  source 1..42: mol_type = other RNA
taatttctactgttgtagattcaaacaaatgtgtcacaaagt

SEQ ID NO: 4375 - RNA, 42 nt, synthetic construct
  misc_feature 1..42: note = Description of Artificial Sequence: Synthetic oligonucleotide
  misc_feature 1..42: note = Category: MG29-1 TRAC Guides
  misc_feature 1..42: note = Description: MG29-1 Guide 6 sgRNA synthesized
  source 1..42: mol_type = other RNA
taatttctactgttgtagattgatgtgtatatcacagacaaa

SEQ ID NO: 4376 - RNA, 42 nt, synthetic construct
  misc_feature 1..42: note = Description of Artificial Sequence: Synthetic oligonucleotide
  misc_feature 1..42: note = Category: MG29-1 TRAC Guides
  misc_feature 1..42: note = Description: MG29-1 Guide 7 sgRNA synthesized
  source 1..42: mol_type = other RNA
taatttctactgttgtagataagagcaacagtgctgtggcct

SEQ ID NO: 4377 - RNA, 42 nt, synthetic construct
  misc_feature 1..42: note = Description of Artificial Sequence: Synthetic oligonucleotide
  misc_feature 1..42: note = Category: MG29-1 TRAC Guides
  misc_feature 1..42: note = Description: MG29-1 Guide 8 sgRNA synthesized
  source 1..42: mol_type = other RNA
taatttctactgttgtagatgcatgtgcaaacgccttcaaca

SEQ ID NO: 4378 - RNA, 42 nt, synthetic construct
  misc_feature 1..42: note = Description of Artificial Sequence: Synthetic oligonucleotide
  misc_feature 1..42: note = Category: MG29-1 TRAC Guides
  misc_feature 1..42: note = Description: MG29-1 Guide 9 sgRNA synthesized
  source 1..42: mol_type = other RNA
taatttctactgttgtagatcatgtgcaaacgccttcaacaa

SEQ ID NO: 4379 - RNA, 42 nt, synthetic construct
  misc_feature 1..42: note = Description of Artificial Sequence: Synthetic oligonucleotide
  misc_feature 1..42: note = Category: MG29-1 TRAC Guides
  misc_feature 1..42: note = Description: MG29-1 Guide 10 sgRNA synthesized
  source 1..42: mol_type = other RNA
taatttctactgttgtagataacaacagcattattccagaag

SEQ ID NO: 4380 - RNA, 42 nt, synthetic construct
  misc_feature 1..42: note = Description of Artificial Sequence: Synthetic oligonucleotide
  misc_feature 1..42: note = Category: MG29-1 TRAC Guides
  misc_feature 1..42: note = Description: MG29-1 Guide 11 sgRNA synthesized
  source 1..42: mol_type = other RNA
taatttctactgttgtagatttccagaagacaccttcttccc

SEQ ID NO: 4381 - RNA, 42 nt, synthetic construct
  misc_feature 1..42: note = Description of Artificial Sequence: Synthetic oligonucleotide
  misc_feature 1..42: note = Category: MG29-1 TRAC Guides
  misc_feature 1..42: note = Description: MG29-1 Guide 12 sgRNA synthesized
  source 1..42: mol_type = other RNA
taatttctactgttgtagatcagaagacaccttcttccccag

SEQ ID NO: 4382 - RNA, 42 nt, synthetic construct
  misc_feature 1..42: note = Description of Artificial Sequence: Synthetic oligonucleotide
  misc_feature 1..42: note = Category: MG29-1 TRAC Guides
  misc_feature 1..42: note = Description: MG29-1 Guide 13 sgRNA synthesized
  source 1..42: mol_type = other RNA
taatttctactgttgtagattggaataatgctgttgttgaag

SEQ ID NO: 4383 - RNA, 42 nt, synthetic construct
  misc_feature 1..42: note = Description of Artificial Sequence: Synthetic oligonucleotide
  misc_feature 1..42: note = Category: MG29-1 TRAC Guides
  misc_feature 1..42: note = Description: MG29-1 Guide 14 sgRNA synthesized
  source 1..42: mol_type = other RNA
taatttctactgttgtagatttgaaggcgtttgcacatgcaa

SEQ ID NO: 4384 - RNA, 42 nt, synthetic construct
  misc_feature 1..42: note = Description of Artificial Sequence: Synthetic oligonucleotide
  misc_feature 1..42: note = Category: MG29-1 TRAC Guides
  misc_feature 1..42: note = Description: MG29-1 Guide 15 sgRNA synthesized
  source 1..42: mol_type = other RNA
taatttctactgttgtagataaggcgtttgcacatgcaaagt

SEQ ID NO: 4385 - RNA, 42 nt, synthetic construct
  misc_feature 1..42: note = Description of Artificial Sequence: Synthetic oligonucleotide
  misc_feature 1..42: note = Category: MG29-1 TRAC Guides
  misc_feature 1..42: note = Description: MG29-1 Guide 16 sgRNA synthesized
  source 1..42: mol_type = other RNA
taatttctactgttgtagatgcacatgcaaagtcagatttgt

SEQ ID NO: 4386 - RNA, 42 nt, synthetic construct
  misc_feature 1..42: note = Description of Artificial Sequence: Synthetic oligonucleotide
  misc_feature 1..42: note = Category: MG29-1 TRAC Guides
  misc_feature 1..42: note = Description: MG29-1 Guide 17 sgRNA synthesized
  source 1..42: mol_type = other RNA
taatttctactgttgtagatcacatgcaaagtcagatttgtt

SEQ ID NO: 4387 - RNA, 42 nt, synthetic construct
  misc_feature 1..42: note = Description of Artificial Sequence: Synthetic oligonucleotide
  misc_feature 1..42: note = Category: MG29-1 TRAC Guides
  misc_feature 1..42: note = Description: MG29-1 Guide 18 sgRNA synthesized
  source 1..42: mol_type = other RNA
taatttctactgttgtagatgttgctccaggccacagcactg

SEQ ID NO: 4388 - RNA, 42 nt, synthetic construct
  misc_feature 1..42: note = Description of Artificial Sequence: Synthetic oligonucleotide
  misc_feature 1..42: note = Category: MG29-1 TRAC Guides
  misc_feature 1..42: note = Description: MG29-1 Guide 19 sgRNA synthesized
  source 1..42: mol_type = other RNA
taatttctactgttgtagatttgctccaggccacagcactgt

SEQ ID NO: 4389 - RNA, 42 nt, synthetic construct
  misc_feature 1..42: note = Description of Artificial Sequence: Synthetic oligonucleotide
  misc_feature 1..42: note = Category: MG29-1 TRAC Guides
  misc_feature 1..42: note = Description: MG29-1 Guide 20 sgRNA synthesized
  source 1..42: mol_type = other RNA
taatttctactgttgtagatctccaggccacagcactgttgc

SEQ ID NO: 4390 - RNA, 42 nt, synthetic construct
  misc_feature 1..42: note = Description of Artificial Sequence: Synthetic oligonucleotide
  misc_feature 1..42: note = Category: MG29-1 TRAC Guides
  misc_feature 1..42: note = Description: MG29-1 Guide 21 sgRNA synthesized
  source 1..42: mol_type = other RNA
taatttctactgttgtagatctcttgaagtccatagacctca

SEQ ID NO: 4391 - RNA, 42 nt, synthetic construct
  misc_feature 1..42: note = Description of Artificial Sequence: Synthetic oligonucleotide
  misc_feature 1..42: note = Category: MG29-1 TRAC Guides
  misc_feature 1..42: note = Description: MG29-1 Guide 22 sgRNA synthesized
  source 1..42: mol_type = other RNA
taatttctactgttgtagataagtccatagacctcatgtcta

SEQ ID NO: 4392 - RNA, 42 nt, synthetic construct
  misc_feature 1..42: note = Description of Artificial Sequence: Synthetic oligonucleotide
  misc_feature 1..42: note = Category: MG29-1 TRAC Guides
  misc_feature 1..42: note = Description: MG29-1 Guide 23 sgRNA synthesized
  source 1..42: mol_type = other RNA
taatttctactgttgtagattgtctgtgatatacacatcaga

SEQ ID NO: 4393 - RNA, 42 nt, synthetic construct
  misc_feature 1..42: note = Description of Artificial Sequence: Synthetic oligonucleotide
  misc_feature 1..42: note = Category: MG29-1 TRAC Guides
  misc_feature 1..42: note = Description: MG29-1 Guide 24 sgRNA synthesized
  source 1..42: mol_type = other RNA
taatttctactgttgtagatgtctgtgatatacacatcagaa

SEQ ID NO: 4394 - RNA, 42 nt, synthetic construct
  misc_feature 1..42: note = Description of Artificial Sequence: Synthetic oligonucleotide
  misc_feature 1..42: note = Category: MG29-1 TRAC Guides
  misc_feature 1..42: note = Description: MG29-1 Guide 25 sgRNA synthesized
  source 1..42: mol_type = other RNA
taatttctactgttgtagattctgtgatatacacatcagaat

SEQ ID NO: 4395 - RNA, 42 nt, synthetic construct
  misc_feature 1..42: note = Description of Artificial Sequence: Synthetic oligonucleotide
  misc_feature 1..42: note = Category: MG29-1 TRAC Guides
  misc_feature 1..42: note = Description: MG29-1 Guide 26 sgRNA synthesized
  source 1..42: mol_type = other RNA
taatttctactgttgtagatctttgtgacacatttgtttgag

SEQ ID NO: 4396 - RNA, 42 nt, synthetic construct
  misc_feature 1..42: note = Description of Artificial Sequence: Synthetic oligonucleotide
  misc_feature 1..42: note = Category: MG29-1 TRAC Guides
  misc_feature 1..42: note = Description: MG29-1 Guide 27 sgRNA synthesized
  source 1..42: mol_type = other RNA
taatttctactgttgtagatgtgacacatttgtttgagaatc

SEQ ID NO: 4397 - RNA, 42 nt, synthetic construct
  misc_feature 1..42: note = Description of Artificial Sequence: Synthetic oligonucleotide
  misc_feature 1..42: note = Category: MG29-1 TRAC Guides
  misc_feature 1..42: note = Description: MG29-1 Guide 28 sgRNA synthesized
  source 1..42: mol_type = other RNA
taatttctactgttgtagattgacacatttgtttgagaatca

SEQ ID NO: 4398 - RNA, 42 nt, synthetic construct
  misc_feature 1..42: note = Description of Artificial Sequence: Synthetic oligonucleotide
  misc_feature 1..42: note = Category: MG29-1 TRAC Guides
  misc_feature 1..42: note = Description: MG29-1 Guide 29 sgRNA synthesized
  source 1..42: mol_type = other RNA
taatttctactgttgtagatgtttgagaatcaaaatcggtga

SEQ ID NO: 4399 - RNA, 42 nt, synthetic construct
  misc_feature 1..42: note = Description of Artificial Sequence: Synthetic oligonucleotide
  misc_feature 1..42: note = Category: MG29-1 TRAC Guides
  misc_feature 1..42: note = Description: MG29-1 Guide 30 sgRNA synthesized
  source 1..42: mol_type = other RNA
taatttctactgttgtagattttgagaatcaaaatcggtgaa

SEQ ID NO: 4400 - RNA, 42 nt, synthetic construct
  misc_feature 1..42: note = Description of Artificial Sequence: Synthetic oligonucleotide
  misc_feature 1..42: note = Category: MG29-1 TRAC Guides
  misc_feature 1..42: note = Description: MG29-1 Guide 31 sgRNA synthesized
  source 1..42: mol_type = other RNA
taatttctactgttgtagatgagaatcaaaatcggtgaatag

SEQ ID NO: 4401 - RNA, 42 nt, synthetic construct
  misc_feature 1..42: note = Description of Artificial Sequence: Synthetic oligonucleotide
  misc_feature 1..42: note = Category: MG29-1 TRAC Guides
  misc_feature 1..42: note = Description: MG29-1 Guide 32 sgRNA synthesized
  source 1..42: mol_type = other RNA
taatttctactgttgtagatagaatcaaaatcggtgaatagg

SEQ ID NO: 4402 - RNA, 42 nt, synthetic construct
  misc_feature 1..42: note = Description of Artificial Sequence: Synthetic oligonucleotide
  misc_feature 1..42: note = Category: MG29-1 TRAC Guides
  misc_feature 1..42: note = Description: MG29-1 Guide 33 sgRNA synthesized
  source 1..42: mol_type = other RNA
taatttctactgttgtagattcactggatttagagtctctca

SEQ ID NO: 4403 - RNA, 42 nt, synthetic construct
  misc_feature 1..42: note = Description of Artificial Sequence: Synthetic oligonucleotide
  misc_feature 1..42: note = Category: MG29-1 TRAC Guides
  misc_feature 1..42: note = Description: MG29-1 Guide 34 sgRNA synthesized
  source 1..42: mol_type = other RNA
taatttctactgttgtagatagagtctctcagctggtacacg

SEQ ID NO: 4404 - RNA, 42 nt, synthetic construct
  misc_feature 1..42: note = Description of Artificial Sequence: Synthetic oligonucleotide
  misc_feature 1..42: note = Category: MG29-1 TRAC Guides
  misc_feature 1..42: note = Description: MG29-1 Guide 35 sgRNA synthesized
  source 1..42: mol_type = other RNA
taatttctactgttgtagatgagtctctcagctggtacacgg

SEQ ID NO: 4405 - RNA, 42 nt, synthetic construct
  misc_feature 1..42: note = Description of Artificial Sequence: Synthetic oligonucleotide
  misc_feature 1..42: note = Category: MG29-1 TRAC Guides
  misc_feature 1..42: note = Description: MG29-1 Guide 36 sgRNA synthesized
  source 1..42: mol_type = other RNA
taatttctactgttgtagatctgtgatgtcaagctggtcgag

SEQ ID NO: 4406 - RNA, 42 nt, synthetic construct
  misc_feature 1..42: note = Description of Artificial Sequence: Synthetic oligonucleotide
  misc_feature 1..42: note = Category: MG29-1 TRAC Guides
  misc_feature 1..42: note = Description: MG29-1 Guide 37 sgRNA synthesized
  source 1..42: mol_type = other RNA
taatttctactgttgtagatcaaagcttttctcgaccagctt

SEQ ID NO: 4407 - RNA, 42 nt, synthetic construct
  misc_feature 1..42: note = Description of Artificial Sequence: Synthetic oligonucleotide
  misc_feature 1..42: note = Category: MG29-1 TRAC Guides
  misc_feature 1..42: note = Description: MG29-1 Guide 38 sgRNA synthesized
  source 1..42: mol_type = other RNA
taatttctactgttgtagataaagcttttctcgaccagcttg

SEQ ID NO: 4408 - RNA, 42 nt, synthetic construct
  misc_feature 1..42: note = Description of Artificial Sequence: Synthetic oligonucleotide
  misc_feature 1..42: note = Category: MG29-1 TRAC Guides
  misc_feature 1..42: note = Description: MG29-1 Guide 39 sgRNA synthesized
  source 1..42: mol_type = other RNA
taatttctactgttgtagattctcgaccagcttgacatcaca

SEQ ID NO: 4409 - RNA, 42 nt, synthetic construct
  misc_feature 1..42: note = Description of Artificial Sequence: Synthetic oligonucleotide
  misc_feature 1..42: note = Category: MG29-1 TRAC Guides
  misc_feature 1..42: note = Description: MG29-1 Guide 40 sgRNA synthesized
  source 1..42: mol_type = other RNA
taatttctactgttgtagatctcgaccagcttgacatcacag

SEQ ID NO: 4410 - RNA, 42 nt, synthetic construct
  misc_feature 1..42: note = Description of Artificial Sequence: Synthetic oligonucleotide
  misc_feature 1..42: note = Category: MG29-1 TRAC Guides
  misc_feature 1..42: note = Description: MG29-1 Guide 41 sgRNA synthesized
  source 1..42: mol_type = other RNA
taatttctactgttgtagattcgaccagcttgacatcacagg

SEQ ID NO: 4411 - RNA, 42 nt, synthetic construct
  misc_feature 1..42: note = Description of Artificial Sequence: Synthetic oligonucleotide
  misc_feature 1..42: note = Category: MG29-1 TRAC Guides
  misc_feature 1..42: note = Description: MG29-1 Guide 42 sgRNA synthesized
  source 1..42: mol_type = other RNA
taatttctactgttgtagatcaaaacctgtcagtgattgggt

SEQ ID NO: 4412 - RNA, 42 nt, synthetic construct
  misc_feature 1..42: note = Description of Artificial Sequence: Synthetic oligonucleotide
  misc_feature 1..42: note = Category: MG29-1 TRAC Guides
  misc_feature 1..42: note = Description: MG29-1 Guide 43 sgRNA synthesized
  source 1..42: mol_type = other RNA
taatttctactgttgtagataaaacctgtcagtgattgggtt

SEQ ID NO: 4413 - RNA, 42 nt, synthetic construct
  misc_feature 1..42: note = Description of Artificial Sequence: Synthetic oligonucleotide
  misc_feature 1..42: note = Category: MG29-1 TRAC Guides
  misc_feature 1..42: note = Description: MG29-1 Guide 44 sgRNA synthesized
  source 1..42: mol_type = other RNA
taatttctactgttgtagatggttccgaatcctcctcctgaa

SEQ ID NO: 4414 - RNA, 42 nt, synthetic construct
  misc_feature 1..42: note = Description of Artificial Sequence: Synthetic oligonucleotide
  misc_feature 1..42: note = Category: MG29-1 TRAC Guides
  misc_feature 1..42: note = Description: MG29-1 Guide 45 sgRNA synthesized
  source 1..42: mol_type = other RNA
taatttctactgttgtagatcgaatcctcctcctgaaagtgg

SEQ ID NO: 4415 - RNA, 42 nt, synthetic construct
  misc_feature 1..42: note = Description of Artificial Sequence: Synthetic oligonucleotide
  misc_feature 1..42: note = Category: MG29-1 TRAC Guides
  misc_feature 1..42: note = Description: MG29-1 Guide 46 sgRNA synthesized
  source 1..42: mol_type = other RNA
taatttctactgttgtagataatctgctcatgacgctgcggc

SEQ ID NO: 4416 - RNA, 42 nt, synthetic construct
  misc_feature 1..42: note = Description of Artificial Sequence: Synthetic oligonucleotide
  misc_feature 1..42: note = Category: MG29-1 TRAC Guides
  misc_feature 1..42: note = Description: MG29-1 Guide 47 sgRNA synthesized
  source 1..42: mol_type = other RNA
taatttctactgttgtagatatctgctcatgacgctgcggct

SEQ ID NO: 4417 - RNA, 42 nt, synthetic construct
  misc_feature 1..42: note = Description of Artificial Sequence: Synthetic oligonucleotide
  misc_feature 1..42: note = Category: MG29-1 TRAC Guides
  misc_feature 1..42: note = Description: MG29-1 Guide 48 sgRNA synthesized
  source 1..42: mol_type = other RNA
taatttctactgttgtagataacccggccactttcaggagga

SEQ ID NO: 4418 - RNA, 42 nt, synthetic construct
  misc_feature 1..42: note = Description of Artificial Sequence: Synthetic oligonucleotide
  misc_feature 1..42: note = Category: MG29-1 TRAC Guides
  misc_feature 1..42: note = Description: MG29-1 Guide 49 sgRNA synthesized
  source 1..42: mol_type = other RNA
taatttctactgttgtagatcaggaggaggattcggaaccca

SEQ ID NO: 4419 - RNA, 42 nt, synthetic construct
  misc_feature 1..42: note = Description of Artificial Sequence: Synthetic oligonucleotide
  misc_feature 1..42: note = Category: MG29-1 TRAC Guides
  misc_feature 1..42: note = Description: MG29-1 Guide 50 sgRNA synthesized
  source 1..42: mol_type = other RNA
taatttctactgttgtagataggaggaggattcggaacccaa

SEQ ID NO: 4420 - RNA, 42 nt, synthetic construct
  misc_feature 1..42: note = Description of Artificial Sequence: Synthetic oligonucleotide
  misc_feature 1..42: note = Category: MG29-1 TRAC Guides
  misc_feature 1..42: note = Description: MG29-1 Guide 51 sgRNA synthesized
  source 1..42: mol_type = other RNA
taatttctactgttgtagatggaacccaatcactgacaggtt

SEQ ID NO: 4421 - RNA, 42 nt, synthetic construct
  misc_feature 1..42: note = Description of Artificial Sequence: Synthetic oligonucleotide
  misc_feature 1..42: note = Category: MG29-1 TRAC Guides
  misc_feature 1..42: note = Description: MG29-1 Guide 52 sgRNA synthesized
  source 1..42: mol_type = other RNA
taatttctactgttgtagattgaaagtttaggttcgtatctg

SEQ ID NO: 4422 - RNA, 42 nt, synthetic construct
  misc_feature 1..42: note = Description of Artificial Sequence: Synthetic oligonucleotide
  misc_feature 1..42: note = Category: MG29-1 TRAC Guides
  misc_feature 1..42: note = Description: MG29-1 Guide 53 sgRNA synthesized
  source 1..42: mol_type = other RNA
taatttctactgttgtagatgaaagtttaggttcgtatctgt

SEQ ID NO: 4423 - RNA, 42 nt, synthetic construct
  misc_feature 1..42: note = Description of Artificial Sequence: Synthetic oligonucleotide
  misc_feature 1..42: note = Category: MG29-1 TRAC Guides
  misc_feature 1..42: note = Description: MG29-1 Guide 54 sgRNA synthesized
  source 1..42: mol_type = other RNA
taatttctactgttgtagataaagtttaggttcgtatctgta

SEQ ID NO: 4424 - DNA, 504 bp, synthetic construct
  misc_feature 1..504: note = Description of Artificial Sequence: Synthetic polynucleotide
  misc_feature 1..504: note = Category: Transgene donor (AAV genome) #3028
  misc_feature 1..504: note = Description: Transgene 5' homology arm
  source 1..504: mol_type = other DNA
ttaattaatgccaacataccataaacctcccattctgctaatgcccagcctaagttggggagaccactccagattccaagatgtacagtttgctttgctgggcctttttcccatgcctgcctttactctgccagagttatattgctggggttttgaagaagatcctattaaataaaagaataagcagtattattaagtagccctgcatttcaggtttccttgagtggcaggccaggcctggccgtgaacgttcactgaaatcatggcctcttggccaagattgatagcttgtgcctgtccctgagtcccagtccatcacgagcagctggtttctaagatgctatttcccgtataaagcatgagaccgtgacttgccagccccacagagccccgcccttgtccatcactggcatctggactccagcctgggttggggcaaagagggaaatgagatcatgtcctaaccctgatcctcttgtcccacagatatccagaaccctgacc

SEQ ID NO: 4425 - DNA, 378 bp, synthetic construct
  misc_feature 1..378: note = Description of Artificial Sequence: Synthetic polynucleotide
  misc_feature 1..378: note = Category: Transgene donor (AAV genome) #3028
  misc_feature 1..378: note = Description: Transgene 3' homology arm
  source 1..378: mol_type = other DNA
tgaaagcttgataatcaacctctggattacaaaatttgtgaaagattgactggtattcttaactatgttgctccttttacgctatgtggatacgctgctttaatgcctttgtatcatgctattgcttcccgtatggctttcattttctcctccttgtataaatcctggttagttcttgccacggcggaactcatcgccgcctgccttgcccgctgctggacaggggctcggctgttgggcactgacaattccgtggaacttgtttattgcagcttataatggttacaaataaagcaatagcatcacaaatttcacaaataaagcatttttttcactgcattctagttgtggtttgtccaaactcatcaatgtatctta

SEQ ID NO: 4426 - DNA, 4220 bp, unidentified
  misc_feature 1..4220: note = Description of Unknown: MG29-1 WT mRNA sequence
  source 1..4220: mol_type = unassigned DNA
taatacgactcactataaggaaaagccagctccagcaggcgctgctcactcctccccatcctctccctctgtccctctgtccctctgaccctgcactgtcccagcaccatggcccccaagaagaagcggaaagttggcggcggaggcagcttcaacaacttcatcaagaaatacagcctgcagaagaccctgcggttcgaactgaagcccgtgggcgagacagcggactacatcgaagacttcaagagcgaatacctgaaggacacggtgctgaaggacgaacagcgggcaaaagactaccaggagatcaaaacactgatcgacgactaccaccgggagtacatcgaagaatgcctgagggaacccgtggacaaaaagaccggcgagatcctggacttcacacaggacctggaagacgcattcagctactaccagaaactgaaagaaaaccccaccgagaaccgagtggggtgggagaaagagcaggagagcctgagaaagaagctggtgaccagcttcgtggggaacgacggcctgttcaagaaagagttcatcacccgcgacctgcccgaatggctgcagaaaaaggggctgtggggcgaatacaaggacaccgtggagaacttcaaaaaattcaccacctacttcagcggcttccacgagaacaggaagaatatgtacacagccgaagcccagagcacagccatcgccaacaggctgatgaacgacaacctgcccaagttcttcaacaactacctggcataccagaccatcaaggagaaacaccccgacctggtgttccgactggacgacgccctgctgcaggccgccggcgtggagcacctggacgaggcattccagcccagatacttcagcagactgttcgcacagagcggaatcacggccttcaacgagctgatcggaggaaggaccacggaaaacggcgaaaagatccagggcctgaacgagcagatcaacctgtacagacagcagaaccccgagaaggccaagggcttcccaagattcatgcccctgttcaagcaaatcctgagcgacagggagacccacagcttcctgcccgacgcattcgaaaacgacaaagagctgctgcaggccctgagggactacgtggacgccgccaccagcgaagaaggaatgatcagccaactgaacaaggccatgaaccagttcgtgaccgccgacctgaaaagggtgtacatcaaaagcgccgccctgaccagcctgagccaggaactgttccacttcttcggcgtgatcagcgacgccatcgcgtggtacgccgagaagagactgagccccaagaaagcccaggagagcttcctgaaacaggaagtgtacgccatcgaagaactgaaccaggccgtggtgggctacatcgaccagctggaagaccagagcgagctgcagcagctgctggtggacctgccagacccccagaaaccagtgagcagcttcatcctgacccactggcaaaaaagccaggagccgctgcaggccgtgatcgcgaaggtggaacccctgttcgaactggaggagctgagcaaaaacaaacgggccccgaaacacgacaaggaccagggaggggaaggcttccagcaggtggacgcaatcaagaacatgctggacgcattcatggaggtgagccacgccatcaagcccctgtacctggtgaagggccggaaagcaatcgacatgccggacgtggacacaggattctacgccgacttcgcggaggcatacagcgcctacgagcaagtgacggtgagcctgtacaacaagacccgaaaccacctgagcaagaaacccttcagcaaagacaaaatcaaaatcaacttcgacgccccaacactgctgaacggctgggacctgaacaaggaaagcgacaacaaaagcatcatcctgagaaaagacggaaacttctacctggccatcatgcaccccaaacacacaaaggtgttcgactgctacagcgccagcgaggcggccgggaaatgctacgagaaaatgaactacaaactgctgagcggcgccaacaagatgctgcccaaagtgttcttcagcaagaagggaatcgaaaccttcagcccaccccaggaaatcctggacctgtacaagaacaacgaacacaagaagggagccaccttcaagctggagagctgccacaagctgatcgacttcttcaagcggaacatccccaagtacaaggtgcacccaaccgacaacttcggatgggacgtcttcggattccacttcagcccaaccagcagctacggcgacctgagcggcttctaccgagaggtggaagcccaggggtacaaactgtggttcagcgacgtgagcgaggcatacatcaacaagtgcgtggaagagggcaaactgttcctgttccagatctacaacaaggacttcagccccaacagcaccgggaagccaaacctgcacacactgtactggaaaggactgttcgaacccgagaacctgaaggacgtggtgctgaaactgaacggcgaggccgagatcttctacaggaaacacagcatcaagcacgaggacaagacgatccaccgggccaaggacccaatcgccaacaaaaacgcagacaaccccaagaagcagagcgtgttcgactacgacatcatcaaggacaagcgctacacccaggacaaattcttcttccacgtgcccatcagcctgaacttcaagagccagggagtggtgcggttcaacgacaagatcaacggcctgctggccgcacaggacgacgtgcacgtgatcgggatcgaccgaggggaacgccacctgctgtactacaccgtggtgaacggcaagggcgaggtggtggaacagggcagcctgaaccaggtggccacagaccaggggtacgtggtggactaccaacagaaactgcacgccaaagagaaggagagagaccaggccaggaagaactggagcaccatcgaaaacatcaaggagctgaaggccgggtacctgagccaggtggtgcacaaactggcccagctgatcgtgaaacacaacgccatcgtgtgcctggaggacctgaacttcggattcaagaggggacggttcaaagtggagaagcaggtgtaccagaagttcgagaaagccctgatcgacaagctgaactacctggtgttcaaggaacggggggccacccaggcaggcggatacctgaacgcctaccagctggccgcaccattcgagagcttcgaaaaactgggcaagcagaccggcatcctgtactacgtgcggagcgactacaccagcaagatcgaccccgccacaggcttcgtggacttcctgaagcccaaatacgaaagcatggcaaagagcaaagtgttcttcgagagcttcgaaagaatccagtggaaccaggccaaaggctacttcgagttcgaattcgactacaagaaaatgtgccccagcaggaagttcggcgactaccgcacccggtgggtggtgtgcacattcggcgacacacggtaccagaacaggcgcaacaaaagcagcggccaatgggagaccgagacaatcgacgtgaccgcccagctgaaggccctgttcgcggcctacggcatcacctacaaccaggaggacaacatcaaggacgccatcgcagccgtgaagtacacaaaattctacaaacagctgtactggctgctgagactgacgctgagcctgcggcacagcgtgaccgggaccgacgaggacttcatcctgagccccgtggccgacgagaacggcgtgttcttcgacagcaggaaggccacggacaaacagcccaaggacgcagacgcgaacggcgcctaccacatcgccctgaagggactgtggaacctgcagcagatcaggcagcacgactggaacgtggaaaaaccaaaaaagctgaacctggccatgaaaaacgaagagtggttcggcttcgcacagaagaagaaattcagggcctctggcggaaaaagacctgccgccacaaagaaagccggacaggccaagaaaaagaagtgaccacacccccattcccccactccagatagaacttcagttatatctcacgtgtctggagttggatccaaaaaaaaaaaaaaaaaaaaaaaaaaaaaaaaaaaaaaaaaaaaaaaaaaaaaaaaaaaaaaaaaaaaaaaaaaaaaaaaaaaaaaaaaaaaaaaaaaaaaaaaaaa

SEQ ID NO: 4427 - DNA, 4220 bp, unidentified
  misc_feature 1..4220: note = Description of Unknown: MG29-1 S168R mRNA sequence
  source 1..4220: mol_type = unassigned DNA
taatacgactcactataaggaaaagccagctccagcaggcgctgctcactcctccccatcctctccctctgtccctctgtccctctgaccctgcactgtcccagcaccatggcccccaagaagaagcggaaagttggcggcggaggcagcttcaacaacttcatcaagaaatacagcctgcagaagaccctgcggttcgaactgaagcccgtgggcgagacagcggactacatcgaagacttcaagagcgaatacctgaaggacacggtgctgaaggacgaacagcgggcaaaagactaccaggagatcaaaacactgatcgacgactaccaccgggagtacatcgaagaatgcctgagggaacccgtggacaaaaagaccggcgagatcctggacttcacacaggacctggaagacgcattcagctactaccagaaactgaaagaaaaccccaccgagaaccgagtggggtgggagaaagagcaggagagcctgagaaagaagctggtgaccagcttcgtggggaacgacggcctgttcaagaaagagttcatcacccgcgacctgcccgaatggctgcagaaaaaggggctgtggggcgaatacaaggacaccgtggagaacttcaaaaaattcaccacctacttcaggggcttccacgagaacaggaagaatatgtacacagccgaagcccagagcacagccatcgccaacaggctgatgaacgacaacctgcccaagttcttcaacaactacctggcataccagaccatcaaggagaaacaccccgacctggtgttccgactggacgacgccctgctgcaggccgccggcgtggagcacctggacgaggcattccagcccagatacttcagcagactgttcgcacagagcggaatcacggccttcaacgagctgatcggaggaaggaccacggaaaacggcgaaaagatccagggcctgaacgagcagatcaacctgtacagacagcagaaccccgagaaggccaagggcttcccaagattcatgcccctgttcaagcaaatcctgagcgacagggagacccacagcttcctgcccgacgcattcgaaaacgacaaagagctgctgcaggccctgagggactacgtggacgccgccaccagcgaagaaggaatgatcagccaactgaacaaggccatgaaccagttcgtgaccgccgacctgaaaagggtgtacatcaaaagcgccgccctgaccagcctgagccaggaactgttccacttcttcggcgtgatcagcgacgccatcgcgtggtacgccgagaagagactgagccccaagaaagcccaggagagcttcctgaaacaggaagtgtacgccatcgaagaactgaaccaggccgtggtgggctacatcgaccagctggaagaccagagcgagctgcagcagctgctggtggacctgccagacccccagaaaccagtgagcagcttcatcctgacccactggcaaaaaagccaggagccgctgcaggccgtgatcgcgaaggtggaacccctgttcgaactggaggagctgagcaaaaacaaacgggccccgaaacacgacaaggaccagggaggggaaggcttccagcaggtggacgcaatcaagaacatgctggacgcattcatggaggtgagccacgccatcaagcccctgtacctggtgaagggccggaaagcaatcgacatgccggacgtggacacaggattctacgccgacttcgcggaggcatacagcgcctacgagcaagtgacggtgagcctgtacaacaagacccgaaaccacctgagcaagaaacccttcagcaaagacaaaatcaaaatcaacttcgacgccccaacactgctgaacggctgggacctgaacaaggaaagcgacaacaaaagcatcatcctgagaaaagacggaaacttctacctggccatcatgcaccccaaacacacaaaggtgttcgactgctacagcgccagcgaggcggccgggaaatgctacgagaaaatgaactacaaactgctgagcggcgccaacaagatgctgcccaaagtgttcttcagcaagaagggaatcgaaaccttcagcccaccccaggaaatcctggacctgtacaagaacaacgaacacaagaagggagccaccttcaagctggagagctgccacaagctgatcgacttcttcaagcggaacatccccaagtacaaggtgcacccaaccgacaacttcggatgggacgtcttcggattccacttcagcccaaccagcagctacggcgacctgagcggcttctaccgagaggtggaagcccaggggtacaaactgtggttcagcgacgtgagcgaggcatacatcaacaagtgcgtggaagagggcaaactgttcctgttccagatctacaacaaggacttcagccccaacagcaccgggaagccaaacctgcacacactgtactggaaaggactgttcgaacccgagaacctgaaggacgtggtgctgaaactgaacggcgaggccgagatcttctacaggaaacacagcatcaagcacgaggacaagacgatccaccgggccaaggacccaatcgccaacaaaaacgcagacaaccccaagaagcagagcgtgttcgactacgacatcatcaaggacaagcgctacacccaggacaaattcttcttccacgtgcccatcagcctgaacttcaagagccagggagtggtgcggttcaacgacaagatcaacggcctgctggccgcacaggacgacgtgcacgtgatcgggatcgaccgaggggaacgccacctgctgtactacaccgtggtgaacggcaagggcgaggtggtggaacagggcagcctgaaccaggtggccacagaccaggggtacgtggtggactaccaacagaaactgcacgccaaagagaaggagagagaccaggccaggaagaactggagcaccatcgaaaacatcaaggagctgaaggccgggtacctgagccaggtggtgcacaaactggcccagctgatcgtgaaacacaacgccatcgtgtgcctggaggacctgaacttcggattcaagaggggacggttcaaagtggagaagcaggtgtaccagaagttcgagaaagccctgatcgacaagctgaactacctggtgttcaaggaacggggggccacccaggcaggcggatacctgaacgcctaccagctggccgcaccattcgagagcttcgaaaaactgggcaagcagaccggcatcctgtactacgtgcggagcgactacaccagcaagatcgaccccgccacaggcttcgtggacttcctgaagcccaaatacgaaagcatggcaaagagcaaagtgttcttcgagagcttcgaaagaatccagtggaaccaggccaaaggctacttcgagttcgaattcgactacaagaaaatgtgccccagcaggaagttcggcgactaccgcacccggtgggtggtgtgcacattcggcgacacacggtaccagaacaggcgcaacaaaagcagcggccaatgggagaccgagacaatcgacgtgaccgcccagctgaaggccctgttcgcggcctacggcatcacctacaaccaggaggacaacatcaaggacgccatcgcagccgtgaagtacacaaaattctacaaacagctgtactggctgctgagactgacgctgagcctgcggcacagcgtgaccgggaccgacgaggacttcatcctgagccccgtggccgacgagaacggcgtgttcttcgacagcaggaaggccacggacaaacagcccaaggacgcagacgcgaacggcgcctaccacatcgccctgaagggactgtggaacctgcagcagatcaggcagcacgactggaacgtggaaaaaccaaaaaagctgaacctggccatgaaaaacgaagagtggttcggcttcgcacagaagaagaaattcagggcctctggcggaaaaagacctgccgccacaaagaaagccggacaggccaagaaaaagaagtgaccacacccccattcccccactccagatagaacttcagttatatctcacgtgtctggagttggatccaaaaaaaaaaaaaaaaaaaaaaaaaaaaaaaaaaaaaaaaaaaaaaaaaaaaaaaaaaaaaaaaaaaaaaaaaaaaaaaaaaaaaaaaaaaaaaaaaaaaaaaaaaa

SEQ ID NO: 4428 - RNA, 42 nt, synthetic construct
  misc_feature 1..42: note = Description of Artificial Sequence: Synthetic oligonucleotide
  misc_feature 1..42: note = Category: MG29-1 sgRNA targeting CD38
  misc_feature 1..42: note = Description: MG29-1-CD38-sgRNA-A1
  source 1..42: mol_type = other RNA
taatttctactgttgtagatccgagaccgtcctggcgcgatg

SEQ ID NO: 4429 - RNA, 42 nt, synthetic construct
  misc_feature 1..42: note = Description of Artificial Sequence: Synthetic oligonucleotide
  misc_feature 1..42: note = Category: MG29-1 sgRNA targeting CD38
  misc_feature 1..42: note = Description: MG29-1-CD38-sgRNA-B1
  source 1..42: mol_type = other RNA
taatttctactgttgtagatagtgtacttgacgcatcgcgcc

SEQ ID NO: 4430 - RNA, 42 nt, synthetic construct
  misc_feature 1..42: note = Description of Artificial Sequence: Synthetic oligonucleotide
  misc_feature 1..42: note = Category: MG29-1 sgRNA targeting CD38
  misc_feature 1..42: note = Description: MG29-1-CD38-sgRNA-C1
  source 1..42: mol_type = other RNA
taatttctactgttgtagattccccggacaccgggctgaact

SEQ ID NO: 4431 - RNA, 42 nt, synthetic construct
  misc_feature 1..42: note = Description of Artificial Sequence: Synthetic oligonucleotide
  misc_feature 1..42: note = Category: MG29-1 sgRNA targeting CD38
  misc_feature 1..42: note = Description: MG29-1-CD38-sgRNA-D1
  source 1..42: mol_type = other RNA
taatttctactgttgtagataagggtgcatttatttcaaaac

SEQ ID NO: 4432 - RNA, 42 nt, synthetic construct
  misc_feature 1..42: note = Description of Artificial Sequence: Synthetic oligonucleotide
  misc_feature 1..42: note = Category: MG29-1 sgRNA targeting CD38
  misc_feature 1..42: note = Description: MG29-1-CD38-sgRNA-E1
  source 1..42: mol_type = other RNA
taatttctactgttgtagattttcaaaacatccttgcaacat

SEQ ID NO: 4433 - RNA, 42 nt, synthetic construct
  misc_feature 1..42: note = Description of Artificial Sequence: Synthetic oligonucleotide
  misc_feature 1..42: note = Category: MG29-1 sgRNA targeting CD38
  misc_feature 1..42: note = Description: MG29-1-CD38-sgRNA-F1
  source 1..42: mol_type = other RNA
taatttctactgttgtagataaaacatccttgcaacattact

SEQ ID NO: 4434 - RNA, 42 nt, synthetic construct
  misc_feature 1..42: note = Description of Artificial Sequence: Synthetic oligonucleotide
  misc_feature 1..42: note = Category: MG29-1 sgRNA targeting CD38
  misc_feature 1..42: note = Description: MG29-1-CD38-sgRNA-G1
  source 1..42: mol_type = other RNA
taatttctactgttgtagatgaaataaatgcacccttgaaag

SEQ ID NO: 4435 - RNA, 42 nt, synthetic construct
  misc_feature 1..42: note = Description of Artificial Sequence: Synthetic oligonucleotide
  misc_feature 1..42: note = Category: MG29-1 sgRNA targeting CD38
  misc_feature 1..42: note = Description: MG29-1-CD38-sgRNA-H1
  source 1..42: mol_type = other RNA
taatttctactgttgtagataaataaatgcacccttgaaagc

SEQ ID NO: 4436 - RNA, 42 nt, synthetic construct
  misc_feature 1..42: note = Description of Artificial Sequence: Synthetic oligonucleotide
  misc_feature 1..42: note = Category: MG29-1 sgRNA targeting CD38
  misc_feature 1..42: note = Description: MG29-1-CD38-sgRNA-A2
  source 1..42: mol_type = other RNA
taatttctactgttgtagatgcagtctacatgtctgagataa

SEQ ID NO: 4437 - RNA, 42 nt, synthetic construct
  misc_feature 1..42: note = Description of Artificial Sequence: Synthetic oligonucleotide
  misc_feature 1..42: note = Category: MG29-1 sgRNA targeting CD38
  misc_feature 1..42: note = Description: MG29-1-CD38-sgRNA-B2
  source 1..42: mol_type = other RNA
taatttctactgttgtagatgagcagaataaaagatctggcc

SEQ ID NO: 4438 - RNA, 42 nt, synthetic construct
  misc_feature 1..42: note = Description of Artificial Sequence: Synthetic oligonucleotide
  misc_feature 1..42: note = Category: MG29-1 sgRNA targeting CD38
  misc_feature 1..42: note = Description: MG29-1-CD38-sgRNA-C2
  source 1..42: mol_type = other RNA
taatttctactgttgtagatattctgctccaaagaagaatct

SEQ ID NO: 4439 - RNA, 42 nt, synthetic construct
  misc_feature 1..42: note = Description of Artificial Sequence: Synthetic oligonucleotide
  misc_feature 1..42: note = Category: MG29-1 sgRNA targeting CD38
  misc_feature 1..42: note = Description: MG29-1-CD38-sgRNA-D2
  source 1..42: mol_type = other RNA
taatttctactgttgtagatttctgctccaaagaagaatcta

SEQ ID NO: 4440 - RNA, 42 nt, synthetic construct
  misc_feature 1..42: note = Description of Artificial Sequence: Synthetic oligonucleotide
  misc_feature 1..42: note = Category: MG29-1 sgRNA targeting CD38
  misc_feature 1..42: note = Description: MG29-1-CD38-sgRNA-E2
  source 1..42: mol_type = other RNA
taatttctactgttgtagatagtattctggaaaacggtttcc

SEQ ID NO: 4441 - RNA, 42 nt, synthetic construct
  misc_feature 1..42: note = Description of Artificial Sequence: Synthetic oligonucleotide
  misc_feature 1..42: note = Category: MG29-1 sgRNA targeting CD38
  misc_feature 1..42: note = Description: MG29-1-CD38-sgRNA-F2
  source 1..42: mol_type = other RNA
taatttctactgttgtagatccgcagggtaagtaccaagtag

SEQ ID NO: 4442 - RNA, 42 nt, synthetic construct
  misc_feature 1..42: note = Description of Artificial Sequence: Synthetic oligonucleotide
  misc_feature 1..42: note = Category: MG29-1 sgRNA targeting CD38
  misc_feature 1..42: note = Description: MG29-1-CD38-sgRNA-G2
  source 1..42: mol_type = other RNA
taatttctactgttgtagatccagaatactgaaacagggttg

SEQ ID NO: 4443 - RNA, 42 nt, synthetic construct
  misc_feature 1..42: note = Description of Artificial Sequence: Synthetic oligonucleotide
  misc_feature 1..42: note = Category: MG29-1 sgRNA targeting CD38
  misc_feature 1..42: note = Description: MG29-1-CD38-sgRNA-H2
  source 1..42: mol_type = other RNA
taatttctactgttgtagatcagaatactgaaacagggttgt

SEQ ID NO: 4444 - RNA, 42 nt, synthetic construct
  misc_feature 1..42: note = Description of Artificial Sequence: Synthetic oligonucleotide
  misc_feature 1..42: note = Category: MG29-1 sgRNA targeting CD38
  misc_feature 1..42: note = Description: MG29-1-CD38-sgRNA-A3
  source 1..42: mol_type = other RNA
taatttctactgttgtagattccagtctgggcaagattgata

SEQ ID NO: 4445 - RNA, 42 nt, synthetic construct
  misc_feature 1..42: note = Description of Artificial Sequence: Synthetic oligonucleotide
  misc_feature 1..42: note = Category: MG29-1 sgRNA targeting CD38
  misc_feature 1..42: note = Description: MG29-1-CD38-sgRNA-B3
  source 1..42: mol_type = other RNA
taatttctactgttgtagattttctaaaagacatagtttgta

SEQ ID NO: 4446 - RNA, 42 nt, synthetic construct
  misc_feature 1..42: note = Description of Artificial Sequence: Synthetic oligonucleotide
  misc_feature 1..42: note = Category: MG29-1 sgRNA targeting CD38
  misc_feature 1..42: note = Description: MG29-1-CD38-sgRNA-C3
  source 1..42: mol_type = other RNA
taatttctactgttgtagatcagaagctgcctgtgatgtggt

SEQ ID NO: 4447 - RNA, 42 nt, synthetic construct
  misc_feature 1..42: note = Description of Artificial Sequence: Synthetic oligonucleotide
  misc_feature 1..42: note = Category: MG29-1 sgRNA targeting CD38
  misc_feature 1..42: note = Description: MG29-1-CD38-sgRNA-D3
  source 1..42: mol_type = other RNA
taatttctactgttgtagatacaaaaacaggtacacatttat

SEQ ID NO: 4448 - RNA, 42 nt, synthetic construct
  misc_feature 1..42: note = Description of Artificial Sequence: Synthetic oligonucleotide
  misc_feature 1..42: note = Category: MG29-1 sgRNA targeting CD38
  misc_feature 1..42: note = Description: MG29-1-CD38-sgRNA-E3
  source 1..42: mol_type = other RNA
taatttctactgttgtagattgtcaaagattttactgcggga

SEQ ID NO: 4449 - RNA, 42 nt, synthetic construct
  misc_feature 1..42: note = Description of Artificial Sequence: Synthetic oligonucleotide
  misc_feature 1..42: note = Category: MG29-1 sgRNA targeting CD38
  misc_feature 1..42: note = Description: MG29-1-CD38-sgRNA-F3
  source 1..42: mol_type = other RNA
taatttctactgttgtagatgtcaaagattttactgcgggat

SEQ ID NO: 4450 - RNA, 42 nt, synthetic construct
  misc_feature 1..42: note = Description of Artificial Sequence: Synthetic oligonucleotide
  misc_feature 1..42: note = Category: MG29-1 sgRNA targeting CD38
  misc_feature 1..42: note = Description: MG29-1-CD38-sgRNA-G3
  source 1..42: mol_type = other RNA
taatttctactgttgtagattcaaagattttactgcgggatc

SEQ ID NO: 4451 - RNA, 42 nt, synthetic construct
  misc_feature 1..42: note = Description of Artificial Sequence: Synthetic oligonucleotide
  misc_feature 1..42: note = Category: MG29-1 sgRNA targeting CD38
  misc_feature 1..42: note = Description: MG29-1-CD38-sgRNA-H3
  source 1..42: mol_type = other RNA
taatttctactgttgtagatactgcgggatccattgagcatc

SEQ ID NO: 4452 - RNA, 42 nt, synthetic construct
  misc_feature 1..42: note = Description of Artificial Sequence: Synthetic oligonucleotide
  misc_feature 1..42: note = Category: MG29-1 sgRNA targeting CD38
  misc_feature 1..42: note = Description: MG29-1-CD38-sgRNA-A4
  source 1..42: mol_type = other RNA
taatttctactgttgtagatctgcgggatccattgagcatca

SEQ ID NO: 4453 - RNA, 42 nt, synthetic construct
  misc_feature 1..42: note = Description of Artificial Sequence: Synthetic oligonucleotide
  misc_feature 1..42: note = Category: MG29-1 sgRNA targeting CD38
  misc_feature 1..42: note = Description: MG29-1-CD38-sgRNA-B4
  source 1..42: mol_type = other RNA
taatttctactgttgtagatgggagtgtggaagtccataatt

SEQ ID NO: 4454 - RNA, 42 nt, synthetic construct
  misc_feature 1..42: note = Description of Artificial Sequence: Synthetic oligonucleotide
  misc_feature 1..42: note = Category: MG29-1 sgRNA targeting CD38
  misc_feature 1..42: note = Description: MG29-1-CD38-sgRNA-C4
  source 1..42: mol_type = other RNA
taatttctactgttgtagatggagtgtggaagtccataattt

SEQ ID NO: 4455 - RNA, 42 nt, synthetic construct
  misc_feature 1..42: note = Description of Artificial Sequence: Synthetic oligonucleotide
  misc_feature 1..42: note = Category: MG29-1 sgRNA targeting CD38
  misc_feature 1..42: note = Description: MG29-1-CD38-sgRNA-D4
  source 1..42: mol_type = other RNA
taatttctactgttgtagatcaaccagagaaggttcagacac

SEQ ID NO: 4456 - RNA, 42 nt, synthetic construct
  misc_feature 1..42: note = Description of Artificial Sequence: Synthetic oligonucleotide
  misc_feature 1..42: note = Category: MG29-1 sgRNA targeting CD38
  misc_feature 1..42: note = Description: MG29-1-CD38-sgRNA-E4
  source 1..42: mol_type = other RNA
taatttctactgttgtagatcctgcaagaatatctacaggta

SEQ ID NO: 4457 - RNA, 42 nt, synthetic construct
  misc_feature 1..42: note = Description of Artificial Sequence: Synthetic oligonucleotide
  misc_feature 1..42: note = Category: MG29-1 sgRNA targeting CD38
  misc_feature 1..42: note = Description: MG29-1-CD38-sgRNA-F4
  source 1..42: mol_type = other RNA
taatttctactgttgtagatctgcaagaatatctacaggtaa

SEQ ID NO: 4458 - RNA, 42 nt, synthetic construct
  misc_feature 1..42: note = Description of Artificial Sequence: Synthetic oligonucleotide
  misc_feature 1..42: note = Category: MG29-1 sgRNA targeting CD38
  misc_feature 1..42: note = Description: MG29-1-CD38-sgRNA-G4
  source 1..42: mol_type = other RNA
taatttctactgttgtagatgcttataatcgattccagctct

SEQ ID NO: 4459 - RNA, 42 nt, synthetic construct
  misc_feature 1..42: note = Description of Artificial Sequence: Synthetic oligonucleotide
  misc_feature 1..42: note = Category: MG29-1 sgRNA targeting CD38
  misc_feature 1..42: note = Description: MG29-1-CD38-sgRNA-H4
  source 1..42: mol_type = other RNA
taatttctactgttgtagatcttataatcgattccagctctt

SEQ ID NO: 4460 - RNA, 42 nt, synthetic construct
  misc_feature 1..42: note = Description of Artificial Sequence: Synthetic oligonucleotide
  misc_feature 1..42: note = Category: MG29-1 sgRNA targeting CD38
  misc_feature 1..42: note = Description: MG29-1-CD38-sgRNA-A5
  source 1..42: mol_type = other RNA
taatttctactgttgtagatatggtgggatcctggcataagt

SEQ ID NO: 4461 - RNA, 42 nt, synthetic construct
  misc_feature 1..42: note = Description of Artificial Sequence: Synthetic oligonucleotide
  misc_feature 1..42: note = Category: MG29-1 sgRNA targeting CD38
  misc_feature 1..42: note = Description: MG29-1-CD38-sgRNA-B5
  source 1..42: mol_type = other RNA
taatttctactgttgtagattggtgggatcctggcataagtc

SEQ ID NO: 4462 - RNA, 42 nt, synthetic construct
  misc_feature 1..42: note = Description of Artificial Sequence: Synthetic oligonucleotide
  misc_feature 1..42: note = Category: MG29-1 sgRNA targeting CD38
  misc_feature 1..42: note = Description: MG29-1-CD38-sgRNA-C5
  source 1..42: mol_type = other RNA
taatttctactgttgtagatttcagtgtgtgaaaaatcctga

SEQ ID NO: 4463 - RNA, 42 nt, synthetic construct
  misc_feature 1..42: note = Description of Artificial Sequence: Synthetic oligonucleotide
  misc_feature 1..42: note = Category: MG29-1 sgRNA targeting CD38
  misc_feature 1..42: note = Description: MG29-1-CD38-sgRNA-D5
  source 1..42: mol_type = other RNA
taatttctactgttgtagattcacacactgaagaaacttgtc

SEQ ID NO: 4464 - RNA, 42 nt, synthetic construct
  misc_feature 1..42: note = Description of Artificial Sequence: Synthetic oligonucleotide
  misc_feature 1..42: note = Category: MG29-1 sgRNA targeting CD38
  misc_feature 1..42: note = Description: MG29-1-CD38-sgRNA-E5
  source 1..42: mol_type = other RNA
taatttctactgttgtagatcacacactgaagaaacttgtca

SEQ ID NO: 4465 - RNA, 42 nt, synthetic construct
  misc_feature 1..42: note = Description of Artificial Sequence: Synthetic oligonucleotide
  misc_feature 1..42: note = Category: MG29-1 sgRNA targeting CD38
  misc_feature 1..42: note = Description: MG29-1-CD38-sgRNA-F5
  source 1..42: mol_type = other RNA
taatttctactgttgtagatacacactgaagaaacttgtcag

SEQ ID NO: 4466 - DNA, 22 bp, unidentified
  misc_feature 1..22: note = Description of Unknown: MG29-1-CD38-target site-A1 sequence
  misc_feature 1..22: note = Category: DNA sequence of CD38 target site
  source 1..22: mol_type = unassigned DNA
ccgagaccgtcctggcgcgatg

SEQ ID NO: 4467 - DNA, 22 bp, unidentified
  misc_feature 1..22: note = Description of Unknown: MG29-1-CD38-target site-B1 sequence
  misc_feature 1..22: note = Category: DNA sequence of CD38 target site
  source 1..22: mol_type = unassigned DNA
agtgtacttgacgcatcgcgcc

SEQ ID NO: 4468 - DNA, 22 bp, unidentified
  misc_feature 1..22: note = Description of Unknown: MG29-1-CD38-target site-C1 sequence
  misc_feature 1..22: note = Category: DNA sequence of CD38 target site
  source 1..22: mol_type = unassigned DNA
tccccggacaccgggctgaact

SEQ ID NO: 4469 - DNA, 22 bp, unidentified
  misc_feature 1..22: note = Description of Unknown: MG29-1-CD38-target site-D1 sequence
  misc_feature 1..22: note = Category: DNA sequence of CD38 target site
  source 1..22: mol_type = unassigned DNA
aagggtgcatttatttcaaaac

SEQ ID NO: 4470 - DNA, 22 bp, unidentified
  misc_feature 1..22: note = Description of Unknown: MG29-1-CD38-target site-E1 sequence
  misc_feature 1..22: note = Category: DNA sequence of CD38 target site
  source 1..22: mol_type = unassigned DNA
tttcaaaacatccttgcaacat

SEQ ID NO: 4471 - DNA, 22 bp, unidentified
  misc_feature 1..22: note = Description of Unknown: MG29-1-CD38-target site-F1 sequence
  misc_feature 1..22: note = Category: DNA sequence of CD38 target site
  source 1..22: mol_type = unassigned DNA
aaaacatccttgcaacattact

SEQ ID NO: 4472 - DNA, 22 bp, unidentified
  misc_feature 1..22: note = Description of Unknown: MG29-1-CD38-target site-G1 sequence
  misc_feature 1..22: note = Category: DNA sequence of CD38 target site
  source 1..22: mol_type = unassigned DNA
gaaataaatgcacccttgaaag

SEQ ID NO: 4473 - DNA, 22 bp, unidentified
  misc_feature 1..22: note = Description of Unknown: MG29-1-CD38-target site-H1 sequence
  misc_feature 1..22: note = Category: DNA sequence of CD38 target site
  source 1..22: mol_type = unassigned DNA
aaataaatgcacccttgaaagc

SEQ ID NO: 4474 - DNA, 22 bp, unidentified
  misc_feature 1..22: note = Description of Unknown: MG29-1-CD38-target site-A2 sequence
  misc_feature 1..22: note = Category: DNA sequence of CD38 target site
  source 1..22: mol_type = unassigned DNA
gcagtctacatgtctgagataa

SEQ ID NO: 4475 - DNA, 22 bp, unidentified
  misc_feature 1..22: note = Description of Unknown: MG29-1-CD38-target site-B2 sequence
  misc_feature 1..22: note = Category: DNA sequence of CD38 target site
  source 1..22: mol_type = unassigned DNA
gagcagaataaaagatctggcc

SEQ ID NO: 4476 - DNA, 22 bp, unidentified
  misc_feature 1..22: note = Description of Unknown: MG29-1-CD38-target site-C2 sequence
  misc_feature 1..22: note = Category: DNA sequence of CD38 target site
  source 1..22: mol_type = unassigned DNA
attctgctccaaagaagaatct

SEQ ID NO: 4477 - DNA, 22 bp, unidentified
  misc_feature 1..22: note = Description of Unknown: MG29-1-CD38-target site-D2 sequence
  misc_feature 1..22: note = Category: DNA sequence of CD38 target site
  source 1..22: mol_type = unassigned DNA
ttctgctccaaagaagaatcta

SEQ ID NO: 4478 - DNA, 22 bp, unidentified
  misc_feature 1..22: note = Description of Unknown: MG29-1-CD38-target site-E2 sequence
  misc_feature 1..22: note = Category: DNA sequence of CD38 target site
  source 1..22: mol_type = unassigned DNA
agtattctggaaaacggtttcc

SEQ ID NO: 4479 - DNA, 22 bp, unidentified
  misc_feature 1..22: note = Description of Unknown: MG29-1-CD38-target site-F2 sequence
  misc_feature 1..22: note = Category: DNA sequence of CD38 target site
  source 1..22: mol_type = unassigned DNA
ccgcagggtaagtaccaagtag

SEQ ID NO: 4480 - DNA, 22 bp, unidentified
  misc_feature 1..22: note = Description of Unknown: MG29-1-CD38-target site-G2 sequence
  misc_feature 1..22: note = Category: DNA sequence of CD38 target site
  source 1..22: mol_type = unassigned DNA
ccagaatactgaaacagggttg

SEQ ID NO: 4481 - DNA, 22 bp, unidentified
  misc_feature 1..22: note = Description of Unknown: MG29-1-CD38-target site-H2 sequence
  misc_feature 1..22: note = Category: DNA sequence of CD38 target site
  source 1..22: mol_type = unassigned DNA
cagaatactgaaacagggttgt

SEQ ID NO: 4482 - DNA, 22 bp, unidentified
  misc_feature 1..22: note = Description of Unknown: MG29-1-CD38-target site-A3 sequence
  misc_feature 1..22: note = Category: DNA sequence of CD38 target site
  source 1..22: mol_type = unassigned DNA
tccagtctgggcaagattgata

SEQ ID NO: 4483 - DNA, 22 bp, unidentified
  misc_feature 1..22: note = Description of Unknown: MG29-1-CD38-target site-B3 sequence
  misc_feature 1..22: note = Category: DNA sequence of CD38 target site
  source 1..22: mol_type = unassigned DNA
tttctaaaagacatagtttgta

SEQ ID NO: 4484 - DNA, 22 bp, unidentified
  misc_feature 1..22: note = Description of Unknown: MG29-1-CD38-target site-C3 sequence
  misc_feature 1..22: note = Category: DNA sequence of CD38 target site
  source 1..22: mol_type = unassigned DNA
cagaagctgcctgtgatgtggt

SEQ ID NO: 4485 - DNA, 22 bp, unidentified
  misc_feature 1..22: note = Description of Unknown: MG29-1-CD38-target site-D3 sequence
  misc_feature 1..22: note = Category: DNA sequence of CD38 target site
  source 1..22: mol_type = unassigned DNA
acaaaaacaggtacacatttat

SEQ ID NO: 4486 - DNA, 22 bp, unidentified
  misc_feature 1..22: note = Description of Unknown: MG29-1-CD38-target site-E3 sequence
  misc_feature 1..22: note = Category: DNA sequence of CD38 target site
  source 1..22: mol_type = unassigned DNA
tgtcaaagattttactgcggga

SEQ ID NO: 4487 - DNA, 22 bp, unidentified
  misc_feature 1..22: note = Description of Unknown: MG29-1-CD38-target site-F3 sequence
  misc_feature 1..22: note = Category: DNA sequence of CD38 target site
  source 1..22: mol_type = unassigned DNA
gtcaaagattttactgcgggat

SEQ ID NO: 4488 - DNA, 22 bp, unidentified
  misc_feature 1..22: note = Description of Unknown: MG29-1-CD38-target site-G3 sequence
  misc_feature 1..22: note = Category: DNA sequence of CD38 target site
  source 1..22: mol_type = unassigned DNA
tcaaagattttactgcgggatc

SEQ ID NO: 4489 - DNA, 22 bp, unidentified
  misc_feature 1..22: note = Description of Unknown: MG29-1-CD38-target site-H3 sequence
  misc_feature 1..22: note = Category: DNA sequence of CD38 target site
  source 1..22: mol_type = unassigned DNA
actgcgggatccattgagcatc

SEQ ID NO: 4490 - DNA, 22 bp, unidentified
  misc_feature 1..22: note = Description of Unknown: MG29-1-CD38-target site-A4 sequence
  misc_feature 1..22: note = Category: DNA sequence of CD38 target site
  source 1..22: mol_type = unassigned DNA
ctgcgggatccattgagcatca

SEQ ID NO: 4491 - DNA, 22 bp, unidentified
  misc_feature 1..22: note = Description of Unknown: MG29-1-CD38-target site-B4 sequence
  misc_feature 1..22: note = Category: DNA sequence of CD38 target site
  source 1..22: mol_type = unassigned DNA
gggagtgtggaagtccataatt

SEQ ID NO: 4492 - DNA, 22 bp, unidentified
  misc_feature 1..22: note = Description of Unknown: MG29-1-CD38-target site-C4 sequence
  misc_feature 1..22: note = Category: DNA sequence of CD38 target site
  source 1..22: mol_type = unassigned DNA
ggagtgtggaagtccataattt

SEQ ID NO: 4493 - DNA, 22 bp, unidentified
  misc_feature 1..22: note = Description of Unknown: MG29-1-CD38-target site-D4 sequence
  misc_feature 1..22: note = Category: DNA sequence of CD38 target site
  source 1..22: mol_type = unassigned DNA
caaccagagaaggttcagacac

SEQ ID NO: 4494 - DNA, 22 bp, unidentified
  misc_feature 1..22: note = Description of Unknown: MG29-1-CD38-target site-E4 sequence
  misc_feature 1..22: note = Category: DNA sequence of CD38 target site
  source 1..22: mol_type = unassigned DNA
cctgcaagaatatctacaggta

SEQ ID NO: 4495 - DNA, 22 bp, unidentified
  misc_feature 1..22: note = Description of Unknown: MG29-1-CD38-target site-F4 sequence
  misc_feature 1..22: note = Category: DNA sequence of CD38 target site
  source 1..22: mol_type = unassigned DNA
ctgcaagaatatctacaggtaa

SEQ ID NO: 4496 - DNA, 22 bp, unidentified
  misc_feature 1..22: note = Description of Unknown: MG29-1-CD38-target site-G4 sequence
  misc_feature 1..22: note = Category: DNA sequence of CD38 target site
  source 1..22: mol_type = unassigned DNA
gcttataatcgattccagctct

SEQ ID NO: 4497 - DNA, 22 bp, unidentified
  misc_feature 1..22: note = Description of Unknown: MG29-1-CD38-target site-H4 sequence
  misc_feature 1..22: note = Category: DNA sequence of CD38 target site
  source 1..22: mol_type = unassigned DNA
cttataatcgattccagctctt

SEQ ID NO: 4498 - DNA, 22 bp, unidentified
  misc_feature 1..22: note = Description of Unknown: MG29-1-CD38-target site-A5 sequence
  misc_feature 1..22: note = Category: DNA sequence of CD38 target site
  source 1..22: mol_type = unassigned DNA
atggtgggatcctggcataagt

SEQ ID NO: 4499 - DNA, 22 bp, unidentified
  misc_feature 1..22: note = Description of Unknown: MG29-1-CD38-target site-B5 sequence
  misc_feature 1..22: note = Category: DNA sequence of CD38 target site
  source 1..22: mol_type = unassigned DNA
tggtgggatcctggcataagtc

SEQ ID NO: 4500 - DNA, 22 bp, unidentified
  misc_feature 1..22: note = Description of Unknown: MG29-1-CD38-target site-C5 sequence
  misc_feature 1..22: note = Category: DNA sequence of CD38 target site
  source 1..22: mol_type = unassigned DNA
ttcagtgtgtgaaaaatcctga

SEQ ID NO: 4501 - DNA, 22 bp, unidentified
  misc_feature 1..22: note = Description of Unknown: MG29-1-CD38-target site-D5 sequence
  misc_feature 1..22: note = Category: DNA sequence of CD38 target site
  source 1..22: mol_type = unassigned DNA
tcacacactgaagaaacttgtc

SEQ ID NO: 4502 - DNA, 22 bp, unidentified
  misc_feature 1..22: note = Description of Unknown: MG29-1-CD38-target site-E5 sequence
  misc_feature 1..22: note = Category: DNA sequence of CD38 target site
  source 1..22: mol_type = unassigned DNA
cacacactgaagaaacttgtca

SEQ ID NO: 4503 - DNA, 22 bp, unidentified
  misc_feature 1..22: note = Description of Unknown: MG29-1-CD38-target site-F5 sequence
  misc_feature 1..22: note = Category: DNA sequence of CD38 target site
  source 1..22: mol_type = unassigned DNA
acacactgaagaaacttgtcag

SEQ ID NO: 4504 - RNA, 42 nt, synthetic construct
  misc_feature 1..42: note = Description of Artificial Sequence: Synthetic oligonucleotide
  misc_feature 1..42: note = Category: MG29-1 sgRNA targeting TIGIT
  misc_feature 1..42: note = Description: MG29-1-TIGIT-sgRNA-A1
  source 1..42: mol_type = other RNA
taatttctactgttgtagataggccttacctgaggcgagggg

SEQ ID NO: 4505 - RNA, 42 nt, synthetic construct
  misc_feature 1..42: note = Description of Artificial Sequence: Synthetic oligonucleotide
  misc_feature 1..42: note = Category: MG29-1 sgRNA targeting TIGIT
  misc_feature 1..42: note = Description: MG29-1-TIGIT-sgRNA-B1
  source 1..42: mol_type = other RNA
taatttctactgttgtagattattgtgcctgtcatcattcct

SEQ ID NO: 4506 - RNA, 42 nt, synthetic construct
  misc_feature 1..42: note = Description of Artificial Sequence: Synthetic oligonucleotide
  misc_feature 1..42: note = Category: MG29-1 sgRNA targeting TIGIT
  misc_feature 1..42: note = Description: MG29-1-TIGIT-sgRNA-C1
  source 1..42: mol_type = other RNA
taatttctactgttgtagattctgcagaaatgttccccgttg

SEQ ID NO: 4507 - RNA, 42 nt, synthetic construct
  misc_feature 1..42: note = Description of Artificial Sequence: Synthetic oligonucleotide
  misc_feature 1..42: note = Category: MG29-1 sgRNA targeting TIGIT
  misc_feature 1..42: note = Description: MG29-1-TIGIT-sgRNA-D1
  source 1..42: mol_type = other RNA
taatttctactgttgtagattgcagagaaaggtggctctatc

SEQ ID NO: 4508 - RNA, 42 nt, synthetic construct
  misc_feature 1..42: note = Description of Artificial Sequence: Synthetic oligonucleotide
  misc_feature 1..42: note = Category: MG29-1 sgRNA targeting TIGIT
  misc_feature 1..42: note = Description: MG29-1-TIGIT-sgRNA-E1
  source 1..42: mol_type = other RNA
taatttctactgttgtagattaatgctgacttggggtggcac

SEQ ID NO: 4509 - RNA, 42 nt, synthetic construct
  misc_feature 1..42: note = Description of Artificial Sequence: Synthetic oligonucleotide
  misc_feature 1..42: note = Category: MG29-1 sgRNA targeting TIGIT
  misc_feature 1..42: note = Description: MG29-1-TIGIT-sgRNA-F1
  source 1..42: mol_type = other RNA
taatttctactgttgtagattaggacctccaggaagattctc

SEQ ID NO: 4510 - RNA, 42 nt, synthetic construct
  misc_feature 1..42: note = Description of Artificial Sequence: Synthetic oligonucleotide
  misc_feature 1..42: note = Category: MG29-1 sgRNA targeting TIGIT
  misc_feature 1..42: note = Description: MG29-1-TIGIT-sgRNA-G1
  source 1..42: mol_type = other RNA
taatttctactgttgtagatgtcctccctctagtggctgagc

SEQ ID NO: 4511 - RNA, 42 nt, synthetic construct
  misc_feature 1..42: note = Description of Artificial Sequence: Synthetic oligonucleotide
  misc_feature 1..42: note = Category: MG29-1 sgRNA targeting TIGIT
  misc_feature 1..42: note = Description: MG29-1-TIGIT-sgRNA-H1
  source 1..42: mol_type = other RNA
taatttctactgttgtagattcctccctctagtggctgagca

SEQ ID NO: 4512 - RNA, 42 nt, synthetic construct
  misc_feature 1..42: note = Description of Artificial Sequence: Synthetic oligonucleotide
  misc_feature 1..42: note = Category: MG29-1 sgRNA targeting TIGIT
  misc_feature 1..42: note = Description: MG29-1-TIGIT-sgRNA-A2
  source 1..42: mol_type = other RNA
taatttctactgttgtagattagtcaacgcgaccaccacgat

SEQ ID NO: 4513 - RNA, 42 nt, synthetic construct
  misc_feature 1..42: note = Description of Artificial Sequence: Synthetic oligonucleotide
  misc_feature 1..42: note = Category: MG29-1 sgRNA targeting TIGIT
  misc_feature 1..42: note = Description: MG29-1-TIGIT-sgRNA-B2
  source 1..42: mol_type = other RNA
taatttctactgttgtagattagtttgtttgtttttagaaga

SEQ ID NO: 4514 - RNA, 42 nt, synthetic construct
  misc_feature 1..42: note = Description of Artificial Sequence: Synthetic oligonucleotide
  misc_feature 1..42: note = Category: MG29-1 sgRNA targeting TIGIT
  misc_feature 1..42: note = Description: MG29-1-TIGIT-sgRNA-C2
  source 1..42: mol_type = other RNA
taatttctactgttgtagattttgtttttagaagaaagccct

SEQ ID NO: 4515 - RNA, 42 nt, synthetic construct
  misc_feature 1..42: note = Description of Artificial Sequence: Synthetic oligonucleotide
  misc_feature 1..42: note = Category: MG29-1 sgRNA targeting TIGIT
  misc_feature 1..42: note = Description: MG29-1-TIGIT-sgRNA-D2
  source 1..42: mol_type = other RNA
taatttctactgttgtagattttttagaagaaagccctcaga

SEQ ID NO: 4516 - RNA, 42 nt, synthetic construct
  misc_feature 1..42: note = Description of Artificial Sequence: Synthetic oligonucleotide
  misc_feature 1..42: note = Category: MG29-1 sgRNA targeting TIGIT
  misc_feature 1..42: note = Description: MG29-1-TIGIT-sgRNA-E2
  source 1..42: mol_type = other RNA
taatttctactgttgtagattagaagaaagccctcagaatcc

SEQ ID NO: 4517 - RNA, 42 nt, synthetic construct
  misc_feature 1..42: note = Description of Artificial Sequence: Synthetic oligonucleotide
  misc_feature 1..42: note = Category: MG29-1 sgRNA targeting TIGIT
  misc_feature 1..42: note = Description: MG29-1-TIGIT-sgRNA-F2
  source 1..42: mol_type = other RNA
taatttctactgttgtagatagaagaaagccctcagaatcca

SEQ ID NO: 4518 - RNA, 42 nt, synthetic construct
  misc_feature 1..42: note = Description of Artificial Sequence: Synthetic oligonucleotide
  misc_feature 1..42: note = Category: MG29-1 sgRNA targeting TIGIT
  misc_feature 1..42: note = Description: MG29-1-TIGIT-sgRNA-G2
  source 1..42: mol_type = other RNA
taatttctactgttgtagatgaagaaagccctcagaatccat

SEQ ID NO: 4519 - RNA, 42 nt, synthetic construct
  misc_feature 1..42: note = Description of Artificial Sequence: Synthetic oligonucleotide
  misc_feature 1..42: note = Category: MG29-1 sgRNA targeting TIGIT
  misc_feature 1..42: note = Description: MG29-1-TIGIT-sgRNA-H2
  source 1..42: mol_type = other RNA
taatttctactgttgtagattcctgaggtcaccttccacaga

SEQ ID NO: 4520 - RNA, 42 nt, synthetic construct
  misc_feature 1..42: note = Description of Artificial Sequence: Synthetic oligonucleotide
  misc_feature 1..42: note = Category: MG29-1 sgRNA targeting TIGIT
  misc_feature 1..42: note = Description: MG29-1-TIGIT-sgRNA-A3
  source 1..42: mol_type = other RNA
taatttctactgttgtagatctcctgaggtcaccttccacag

SEQ ID NO: 4521 - DNA, 22 bp, unidentified
  misc_feature 1..22: note = Description of Unknown: MG29-1-TIGIT-target site-A1 sequence
  misc_feature 1..22: note = Category: DNA sequence of TIGIT target site
  source 1..22: mol_type = unassigned DNA
aggccttacctgaggcgagggg

SEQ ID NO: 4522 - DNA, 22 bp, unidentified
  misc_feature 1..22: note = Description of Unknown: MG29-1-TIGIT-target site-B1 sequence
  misc_feature 1..22: note = Category: DNA sequence of TIGIT target site
  source 1..22: mol_type = unassigned DNA
tattgtgcctgtcatcattcct

SEQ ID NO: 4523 - DNA, 22 bp, unidentified
  misc_feature 1..22: note = Description of Unknown: MG29-1-TIGIT-target site-C1 sequence
  misc_feature 1..22: note = Category: DNA sequence of TIGIT target site
  source 1..22: mol_type = unassigned DNA
tctgcagaaatgttccccgttg

SEQ ID NO: 4524 - DNA, 22 bp, unidentified
  misc_feature 1..22: note = Description of Unknown: MG29-1-TIGIT-target site-D1 sequence
  misc_feature 1..22: note = Category: DNA sequence of TIGIT target site
  source 1..22: mol_type = unassigned DNA
tgcagagaaaggtggctctatc

SEQ ID NO: 4525 - DNA, 22 bp, unidentified
  misc_feature 1..22: note = Description of Unknown: MG29-1-TIGIT-target site-E1 sequence
  misc_feature 1..22: note = Category: DNA sequence of TIGIT target site
  source 1..22: mol_type = unassigned DNA
taatgctgacttggggtggcac

SEQ ID NO: 4526 - DNA, 22 bp, unidentified
  misc_feature 1..22: note = Description of Unknown: MG29-1-TIGIT-target site-F1 sequence
  misc_feature 1..22: note = Category: DNA sequence of TIGIT target site
  source 1..22: mol_type = unassigned DNA
taggacctccaggaagattctc

SEQ ID NO: 4527 - DNA, 22 bp, unidentified
  misc_feature 1..22: note = Description of Unknown: MG29-1-TIGIT-target site-G1 sequence
  misc_feature 1..22: note = Category: DNA sequence of TIGIT target site
  source 1..22: mol_type = unassigned DNA
gtcctccctctagtggctgagc

SEQ ID NO: 4528 - DNA, 22 bp, unidentified
  misc_feature 1..22: note = Description of Unknown: MG29-1-TIGIT-target site-H1 sequence
  misc_feature 1..22: note = Category: DNA sequence of TIGIT target site
  source 1..22: mol_type = unassigned DNA
tcctccctctagtggctgagca

SEQ ID NO: 4529 - DNA, 22 bp, unidentified
  misc_feature 1..22: note = Description of Unknown: MG29-1-TIGIT-target site-A2 sequence
  misc_feature 1..22: note = Category: DNA sequence of TIGIT target site
  source 1..22: mol_type = unassigned DNA
tagtcaacgcgaccaccacgat

SEQ ID NO: 4530 - DNA, 22 bp, unidentified
  misc_feature 1..22: note = Description of Unknown: MG29-1-TIGIT-target site-B2 sequence
  misc_feature 1..22: note = Category: DNA sequence of TIGIT target site
  source 1..22: mol_type = unassigned DNA
tagtttgtttgtttttagaaga

SEQ ID NO: 4531 - DNA, 22 bp, unidentified
  misc_feature 1..22: note = Description of Unknown: MG29-1-TIGIT-target site-C2 sequence
  misc_feature 1..22: note = Category: DNA sequence of TIGIT target site
  source 1..22: mol_type = unassigned DNA
tttgtttttagaagaaagccct

SEQ ID NO: 4532 - DNA, 22 bp, unidentified
  misc_feature 1..22: note = Description of Unknown: MG29-1-TIGIT-target site-D2 sequence
  misc_feature 1..22: note = Category: DNA sequence of TIGIT target site
  source 1..22: mol_type = unassigned DNA
tttttagaagaaagccctcaga

SEQ ID NO: 4533 - DNA, 22 bp, unidentified
  misc_feature 1..22: note = Description of Unknown: MG29-1-TIGIT-target site-E2 sequence
  misc_feature 1..22: note = Category: DNA sequence of TIGIT target site
  source 1..22: mol_type = unassigned DNA
tagaagaaagccctcagaatcc

SEQ ID NO: 4534 - DNA, 22 bp, unidentified
  misc_feature 1..22: note = Description of Unknown: MG29-1-TIGIT-target site-F2 sequence
  misc_feature 1..22: note = Category: DNA sequence of TIGIT target site
  source 1..22: mol_type = unassigned DNA
agaagaaagccctcagaatcca

SEQ ID NO: 4535 - DNA, 22 bp, unidentified
  misc_feature 1..22: note = Description of Unknown: MG29-1-TIGIT-target site-G2 sequence
  misc_feature 1..22: note = Category: DNA sequence of TIGIT target site
  source 1..22: mol_type = unassigned DNA
gaagaaagccctcagaatccat

SEQ ID NO: 4536 - DNA, 22 bp, unidentified
  misc_feature 1..22: note = Description of Unknown: MG29-1-TIGIT-target site-H2 sequence
  misc_feature 1..22: note = Category: DNA sequence of TIGIT target site
  source 1..22: mol_type = unassigned DNA
ctcctgaggtcaccttccacag

SEQ ID NO: 4537 - DNA, 22 bp, unidentified
  misc_feature 1..22: note = Description of Unknown: MG29-1-TIGIT-target site-A3 sequence
  misc_feature 1..22: note = Category: DNA sequence of TIGIT target site
  source 1..22: mol_type = unassigned DNA
tcctgaggtcaccttccacaga

SEQ ID NO: 4538 - RNA, 42 nt, synthetic construct
  misc_feature 1..42: note = Description of Artificial Sequence: Synthetic oligonucleotide
  misc_feature 1..42: note = Category: MG29-1 sgRNA targeting AAVS1
  misc_feature 1..42: note = Description: MG29-1-AAVS1-sgRNA-A1
  source 1..42: mol_type = other RNA
taatttctactgttgtagatgtttttccaaactgcttctcct

SEQ ID NO: 4539 - RNA, 42 nt, synthetic construct
  misc_feature 1..42: note = Description of Artificial Sequence: Synthetic oligonucleotide
  misc_feature 1..42: note = Category: MG29-1 sgRNA targeting AAVS1
  misc_feature 1..42: note = Description: MG29-1-AAVS1-sgRNA-B1
  source 1..42: mol_type = other RNA
taatttctactgttgtagattttttccaaactgcttctcctc

SEQ ID NO: 4540 - RNA, 42 nt, synthetic construct
  misc_feature 1..42: note = Description of Artificial Sequence: Synthetic oligonucleotide
  misc_feature 1..42: note = Category: MG29-1 sgRNA targeting AAVS1
  misc_feature 1..42: note = Description: MG29-1-AAVS1-sgRNA-C1
  source 1..42: mol_type = other RNA
taatttctactgttgtagattccaaactgcttctcctcttgg

SEQ ID NO: 4541 - RNA, 42 nt, synthetic construct
  misc_feature 1..42: note = Description of Artificial Sequence: Synthetic oligonucleotide
  misc_feature 1..42: note = Category: MG29-1 sgRNA targeting AAVS1
  misc_feature 1..42: note = Description: MG29-1-AAVS1-sgRNA-D1
  source 1..42: mol_type = other RNA
taatttctactgttgtagatccaaactgcttctcctcttggg

SEQ ID NO: 4542 - RNA, 42 nt, synthetic construct
  misc_feature 1..42: note = Description of Artificial Sequence: Synthetic oligonucleotide
  misc_feature 1..42: note = Category: MG29-1 sgRNA targeting AAVS1
  misc_feature 1..42: note = Description: MG29-1-AAVS1-sgRNA-E1
  source 1..42: mol_type = other RNA
taatttctactgttgtagatcaaactgcttctcctcttggga

SEQ ID NO: 4543 - RNA, 42 nt, synthetic construct
  misc_feature 1..42: note = Description of Artificial Sequence: Synthetic oligonucleotide
  misc_feature 1..42: note = Category: MG29-1 sgRNA targeting AAVS1
  misc_feature 1..42: note = Description: MG29-1-AAVS1-sgRNA-F1
  source 1..42: mol_type = other RNA
taatttctactgttgtagatctgtcaccaatcctgtccctag

SEQ ID NO: 4544 - RNA, 42 nt, synthetic construct
  misc_feature 1..42: note = Description of Artificial Sequence: Synthetic oligonucleotide
  misc_feature 1..42: note = Category: MG29-1 sgRNA targeting AAVS1
  misc_feature 1..42: note = Description: MG29-1-AAVS1-sgRNA-G1
  source 1..42: mol_type = other RNA
taatttctactgttgtagattgtcaccaatcctgtccctagt

SEQ ID NO: 4545 - RNA, 42 nt, synthetic construct
  misc_feature 1..42: note = Description of Artificial Sequence: Synthetic oligonucleotide
  misc_feature 1..42: note = Category: MG29-1 sgRNA targeting AAVS1
  misc_feature 1..42: note = Description: MG29-1-AAVS1-sgRNA-H1
  source 1..42: mol_type = other RNA
taatttctactgttgtagatgggttgtccagaaaaacggtga

SEQ ID NO: 4546 - RNA, 42 nt, synthetic construct
  misc_feature 1..42: note = Description of Artificial Sequence: Synthetic oligonucleotide
  misc_feature 1..42: note = Category: MG29-1 sgRNA targeting AAVS1
  misc_feature 1..42: note = Description: MG29-1-AAVS1-sgRNA-A2
  source 1..42: mol_type = other RNA
taatttctactgttgtagatccttctccttctggggcctgtg

SEQ ID NO: 4547 - RNA, 42 nt, synthetic construct
  misc_feature 1..42: note = Description of Artificial Sequence: Synthetic oligonucleotide
  misc_feature 1..42: note = Category: MG29-1 sgRNA targeting AAVS1
  misc_feature 1..42: note = Description: MG29-1-AAVS1-sgRNA-B2
  source 1..42: mol_type = other RNA
taatttctactgttgtagatcttctccttctggggcctgtgc

SEQ ID NO: 4548 - RNA, 42 nt, synthetic construct
  misc_feature 1..42: note = Description of Artificial Sequence: Synthetic oligonucleotide
  misc_feature 1..42: note = Category: MG29-1 sgRNA targeting AAVS1
  misc_feature 1..42: note = Description: MG29-1-AAVS1-sgRNA-C2
  source 1..42: mol_type = other RNA
taatttctactgttgtagatttaggatggccttctccgacgg

SEQ ID NO: 4549 - RNA, 42 nt, synthetic construct
  misc_feature 1..42: note = Description of Artificial Sequence: Synthetic oligonucleotide
  misc_feature 1..42: note = Category: MG29-1 sgRNA targeting AAVS1
  misc_feature 1..42: note = Description: MG29-1-AAVS1-sgRNA-D2
  source 1..42: mol_type = other RNA
taatttctactgttgtagattctggacaaccccaaagtaccc

SEQ ID NO: 4550 - RNA, 42 nt, synthetic construct
  misc_feature 1..42: note = Description of Artificial Sequence: Synthetic oligonucleotide
  misc_feature 1..42: note = Category: MG29-1 sgRNA targeting AAVS1
  misc_feature 1..42: note = Description: MG29-1-AAVS1-sgRNA-E2
  source 1..42: mol_type = other RNA
taatttctactgttgtagatctggacaaccccaaagtacccc

SEQ ID NO: 4551 - RNA, 42 nt, synthetic construct
  misc_feature 1..42: note = Description of Artificial Sequence: Synthetic oligonucleotide
  misc_feature 1..42: note = Category: MG29-1 sgRNA targeting AAVS1
  misc_feature 1..42: note = Description: MG29-1-AAVS1-sgRNA-F2
  source 1..42: mol_type = other RNA
taatttctactgttgtagattggacaaccccaaagtaccccg

SEQ ID NO: 4552 - RNA, 42 nt, synthetic construct
  misc_feature 1..42: note = Description of Artificial Sequence: Synthetic oligonucleotide
  misc_feature 1..42: note = Category: MG29-1 sgRNA targeting AAVS1
  misc_feature 1..42: note = Description: MG29-1-AAVS1-sgRNA-G2
  source 1..42: mol_type = other RNA
taatttctactgttgtagatgccacctctccatcctcttgct

SEQ ID NO: 4553 - RNA, 42 nt, synthetic construct
  misc_feature 1..42: note = Description of Artificial Sequence: Synthetic oligonucleotide
  misc_feature 1..42: note = Category: MG29-1 sgRNA targeting AAVS1
  misc_feature 1..42: note = Description: MG29-1-AAVS1-sgRNA-H2
  source 1..42: mol_type = other RNA
taatttctactgttgtagattttgcctggacaccccgttctc

SEQ ID NO: 4554 - RNA, 42 nt, synthetic construct
  misc_feature 1..42: note = Description of Artificial Sequence: Synthetic oligonucleotide
  misc_feature 1..42: note = Category: MG29-1 sgRNA targeting AAVS1
  misc_feature 1..42: note = Description: MG29-1-AAVS1-sgRNA-A3
  source 1..42: mol_type = other RNA
taatttctactgttgtagatcctggacaccccgttctcctgt

SEQ ID NO: 4555 - RNA, 42 nt, synthetic construct
  misc_feature 1..42: note = Description of Artificial Sequence: Synthetic oligonucleotide
  misc_feature 1..42: note = Category: MG29-1 sgRNA targeting AAVS1
  misc_feature 1..42: note = Description: MG29-1-AAVS1-sgRNA-B3
  source 1..42: mol_type = other RNA
taatttctactgttgtagatatttgggcagctcccctacccc

SEQ ID NO: 4556 - RNA, 42 nt, synthetic construct
  misc_feature 1..42: note = Description of Artificial Sequence: Synthetic oligonucleotide
  misc_feature 1..42: note = Category: MG29-1 sgRNA targeting AAVS1
  misc_feature 1..42: note = Description: MG29-1-AAVS1-sgRNA-C3
  source 1..42: mol_type = other RNA
taatttctactgttgtagatggcagctcccctacccccctta

SEQ ID NO: 4557 - RNA, 42 nt, synthetic construct
  misc_feature 1..42: note = Description of Artificial Sequence: Synthetic oligonucleotide
  misc_feature 1..42: note = Category: MG29-1 sgRNA targeting AAVS1
  misc_feature 1..42: note = Description: MG29-1-AAVS1-sgRNA-D3
  source 1..42: mol_type = other RNA
taatttctactgttgtagatctgcctccagggatcctgtgtc

SEQ ID NO: 4558 - RNA, 42 nt, synthetic construct
  misc_feature 1..42: note = Description of Artificial Sequence: Synthetic oligonucleotide
  misc_feature 1..42: note = Category: MG29-1 sgRNA targeting AAVS1
  misc_feature 1..42: note = Description: MG29-1-AAVS1-sgRNA-E3
  source 1..42: mol_type = other RNA
taatttctactgttgtagatatctgtcccctccaccccacag

SEQ ID NO: 4559 - RNA, 42 nt, synthetic construct
  misc_feature 1..42: note = Description of Artificial Sequence: Synthetic oligonucleotide
  misc_feature 1..42: note = Category: MG29-1 sgRNA targeting AAVS1
  misc_feature 1..42: note = Description: MG29-1-AAVS1-sgRNA-F3
  source 1..42: mol_type = other RNA
taatttctactgttgtagattctgtcccctccaccccacagt

SEQ ID NO: 4560 - RNA, 42 nt, synthetic construct
  misc_feature 1..42: note = Description of Artificial Sequence: Synthetic oligonucleotide
  misc_feature 1..42: note = Category: MG29-1 sgRNA targeting AAVS1
  misc_feature 1..42: note = Description: MG29-1-AAVS1-sgRNA-G3
  source 1..42: mol_type = other RNA
taatttctactgttgtagatctggagccatctctctccttgc

SEQ ID NO: 4561 - RNA, 42 nt, synthetic construct
  misc_feature 1..42: note = Description of Artificial Sequence: Synthetic oligonucleotide
  misc_feature 1..42: note = Category: MG29-1 sgRNA targeting AAVS1
  misc_feature 1..42: note = Description: MG29-1-AAVS1-sgRNA-H3
  source 1..42: mol_type = other RNA
taatttctactgttgtagatcttacgatggagccagagagga

SEQ ID NO: 4562 - RNA, 42 nt, synthetic construct
  misc_feature 1..42: note = Description of Artificial Sequence: Synthetic oligonucleotide
  misc_feature 1..42: note = Category: MG29-1 sgRNA targeting AAVS1
  misc_feature 1..42: note = Description: MG29-1-AAVS1-sgRNA-A4
  source 1..42: mol_type = other RNA
taatttctactgttgtagatactgatcctggtgctgcagctt

SEQ ID NO: 4563 - RNA, 42 nt, synthetic construct
  misc_feature 1..42: note = Description of Artificial Sequence: Synthetic oligonucleotide
  misc_feature 1..42: note = Category: MG29-1 sgRNA targeting AAVS1
  misc_feature 1..42: note = Description: MG29-1-AAVS1-sgRNA-B4
  source 1..42: mol_type = other RNA
taatttctactgttgtagatgaaaaacaaaatcagaataagt

SEQ ID NO: 4564 - RNA, 42 nt, synthetic construct
  misc_feature 1..42: note = Description of Artificial Sequence: Synthetic oligonucleotide
  misc_feature 1..42: note = Category: MG29-1 sgRNA targeting AAVS1
  misc_feature 1..42: note = Description: MG29-1-AAVS1-sgRNA-C4
  source 1..42: mol_type = other RNA
taatttctactgttgtagatgctcttcacctttctagtcccc

SEQ ID NO: 4565 - RNA, 42 nt, synthetic construct
  misc_feature 1..42: note = Description of Artificial Sequence: Synthetic oligonucleotide
  misc_feature 1..42: note = Category: MG29-1 sgRNA targeting AAVS1
  misc_feature 1..42: note = Description: MG29-1-AAVS1-sgRNA-D4
  source 1..42: mol_type = other RNA
taatttctactgttgtagattagtccccaatttatattgttc

SEQ ID NO: 4566 - RNA, 42 nt, synthetic construct
  misc_feature 1..42: note = Description of Artificial Sequence: Synthetic oligonucleotide
  misc_feature 1..42: note = Category: MG29-1 sgRNA targeting AAVS1
  misc_feature 1..42: note = Description: MG29-1-AAVS1-sgRNA-E4
  source 1..42: mol_type = other RNA
taatttctactgttgtagattattgttcctccgtgcgtcagt

SEQ ID NO: 4567 - RNA, 42 nt, synthetic construct
  misc_feature 1..42: note = Description of Artificial Sequence: Synthetic oligonucleotide
  misc_feature 1..42: note = Category: MG29-1 sgRNA targeting AAVS1
  misc_feature 1..42: note = Description: MG29-1-AAVS1-sgRNA-F4
  source 1..42: mol_type = other RNA
taatttctactgttgtagatacctgtgagataaggccagtag

SEQ ID NO: 4568 - RNA, 42 nt, synthetic construct
  misc_feature 1..42: note = Description of Artificial Sequence: Synthetic oligonucleotide
  misc_feature 1..42: note = Category: MG29-1 sgRNA targeting AAVS1
  misc_feature 1..42: note = Description: MG29-1-AAVS1-sgRNA-G4
  source 1..42: mol_type = other RNA
taatttctactgttgtagatcctgtgagataaggccagtagc

SEQ ID NO: 4569 - DNA, 22 bp, unidentified
  misc_feature 1..22: note = Description of Unknown: MG29-1-AAVS1-target site-A1 sequence
  misc_feature 1..22: note = Category: DNA sequence of AAVS1 target site
  source 1..22: mol_type = unassigned DNA
gtttttccaaactgcttctcct

SEQ ID NO: 4570 - DNA, 22 bp, unidentified
  misc_feature 1..22: note = Description of Unknown: MG29-1-AAVS1-target site-B1 sequence
  misc_feature 1..22: note = Category: DNA sequence of AAVS1 target site
  source 1..22: mol_type = unassigned DNA
tttttccaaactgcttctcctc

SEQ ID NO: 4571 - DNA, 22 bp, unidentified
  misc_feature 1..22: note = Description of Unknown: MG29-1-AAVS1-target site-C1 sequence
  misc_feature 1..22: note = Category: DNA sequence of AAVS1 target site
  source 1..22: mol_type = unassigned DNA
tccaaactgcttctcctcttgg

SEQ ID NO: 4572 - DNA, 22 bp, unidentified
  misc_feature 1..22: note = Description of Unknown: MG29-1-AAVS1-target site-D1 sequence
  misc_feature 1..22: note = Category: DNA sequence of AAVS1 target site
  source 1..22: mol_type = unassigned DNA
ccaaactgcttctcctcttggg

SEQ ID NO: 4573 - DNA, 22 bp, unidentified
  misc_feature 1..22: note = Description of Unknown: MG29-1-AAVS1-target site-E1 sequence
  misc_feature 1..22: note = Category: DNA sequence of AAVS1 target site
  source 1..22: mol_type = unassigned DNA
caaactgcttctcctcttggga

SEQ ID NO: 4574 - DNA, 22 bp, unidentified
  misc_feature 1..22: note = Description of Unknown: MG29-1-AAVS1-target site-F1 sequence
  misc_feature 1..22: note = Category: DNA sequence of AAVS1 target site
  source 1..22: mol_type = unassigned DNA
ctgtcaccaatcctgtccctag

SEQ ID NO: 4575 - DNA, 22 bp, unidentified
  misc_feature 1..22: note = Description of Unknown: MG29-1-AAVS1-target site-G1 sequence
  misc_feature 1..22: note = Category: DNA sequence of AAVS1 target site
  source 1..22: mol_type = unassigned DNA
tgtcaccaatcctgtccctagt

SEQ ID NO: 4576 - DNA, 22 bp, unidentified
  misc_feature 1..22: note = Description of Unknown: MG29-1-AAVS1-target site-H1 sequence
  misc_feature 1..22: note = Category: DNA sequence of AAVS1 target site
  source 1..22: mol_type = unassigned DNA
gggttgtccagaaaaacggtga

SEQ ID NO: 4577 - DNA, 22 bp, unidentified
  misc_feature 1..22: note = Description of Unknown: MG29-1-AAVS1-target site-A2 sequence
  misc_feature 1..22: note = Category: DNA sequence of AAVS1 target site
  source 1..22: mol_type = unassigned DNA
ccttctccttctggggcctgtg

SEQ ID NO: 4578 - DNA, 22 bp, unidentified
  misc_feature 1..22: note = Description of Unknown: MG29-1-AAVS1-target site-B2 sequence
  misc_feature 1..22: note = Category: DNA sequence of AAVS1 target site
  source 1..22: mol_type = unassigned DNA
cttctccttctggggcctgtgc

SEQ ID NO: 4579 - DNA, 22 bp, unidentified
  misc_feature 1..22: note = Description of Unknown: MG29-1-AAVS1-target site-C2 sequence
  misc_feature 1..22: note = Category: DNA sequence of AAVS1 target site
  source 1..22: mol_type = unassigned DNA
ttaggatggccttctccgacgg

SEQ ID NO: 4580 - DNA, 22 bp, unidentified
  misc_feature 1..22: note = Description of Unknown: MG29-1-AAVS1-target site-D2 sequence
  misc_feature 1..22: note = Category: DNA sequence of AAVS1 target site
  source 1..22: mol_type = unassigned DNA
tctggacaaccccaaagtaccc

SEQ ID NO: 4581 - DNA, 22 bp, unidentified
  misc_feature 1..22: note = Description of Unknown: MG29-1-AAVS1-target site-E2 sequence
  misc_feature 1..22: note = Category: DNA sequence of AAVS1 target site
  source 1..22: mol_type = unassigned DNA
ctggacaaccccaaagtacccc

SEQ ID NO: 4582 - DNA, 22 bp, unidentified
  misc_feature 1..22: note = Description of Unknown: MG29-1-AAVS1-target site-F2 sequence
  misc_feature 1..22: note = Category: DNA sequence of AAVS1 target site
  source 1..22: mol_type = unassigned DNA
tggacaaccccaaagtaccccg

SEQ ID NO: 4583 - DNA, 22 bp, unidentified
  misc_feature 1..22: note = Description of Unknown: MG29-1-AAVS1-target site-G2 sequence
  misc_feature 1..22: note = Category: DNA sequence of AAVS1 target site
  source 1..22: mol_type = unassigned DNA
gccacctctccatcctcttgct

SEQ ID NO: 4584 - DNA, 22 bp, unidentified
  misc_feature 1..22: note = Description of Unknown: MG29-1-AAVS1-target site-H2 sequence
  misc_feature 1..22: note = Category: DNA sequence of AAVS1 target site
  source 1..22: mol_type = unassigned DNA
tttgcctggacaccccgttctc

SEQ ID NO: 4585 - DNA, 22 bp, unidentified
  misc_feature 1..22: note = Description of Unknown: MG29-1-AAVS1-target site-A3 sequence
  misc_feature 1..22: note = Category: DNA sequence of AAVS1 target site
  source 1..22: mol_type = unassigned DNA
cctggacaccccgttctcctgt

SEQ ID NO: 4586 - DNA, 22 bp, unidentified
  misc_feature 1..22: note = Description of Unknown: MG29-1-AAVS1-target site-B3 sequence
  misc_feature 1..22: note = Category: DNA sequence of AAVS1 target site
  source 1..22: mol_type = unassigned DNA
atttgggcagctcccctacccc

SEQ ID NO: 4587 - DNA, 22 bp, unidentified
  misc_feature 1..22: note = Description of Unknown: MG29-1-AAVS1-target site-C3 sequence
  misc_feature 1..22: note = Category: DNA sequence of AAVS1 target site
  source 1..22: mol_type = unassigned DNA
ggcagctcccctacccccctta

SEQ ID NO: 4588 - DNA, 22 bp, unidentified
  misc_feature 1..22: note = Description of Unknown: MG29-1-AAVS1-target site-D3 sequence
  misc_feature 1..22: note = Category: DNA sequence of AAVS1 target site
  source 1..22: mol_type = unassigned DNA
ctgcctccagggatcctgtgtc

SEQ ID NO: 4589 - DNA, 22 bp, unidentified
  misc_feature 1..22: note = Description of Unknown: MG29-1-AAVS1-target site-E3 sequence
  misc_feature 1..22: note = Category: DNA sequence of AAVS1 target site
  source 1..22: mol_type = unassigned DNA
atctgtcccctccaccccacag

SEQ ID NO: 4590 - DNA, 22 bp, unidentified
  misc_feature 1..22: note = Description of Unknown: MG29-1-AAVS1-target site-F3 sequence
  misc_feature 1..22: note = Category: DNA sequence of AAVS1 target site
  source 1..22: mol_type = unassigned DNA
tctgtcccctccaccccacagt

SEQ ID NO: 4591 - DNA, 22 bp, unidentified
  misc_feature 1..22: note = Description of Unknown: MG29-1-AAVS1-target site-G3 sequence
  misc_feature 1..22: note = Category: DNA sequence of AAVS1 target site
  source 1..22: mol_type = unassigned DNA
ctggagccatctctctccttgc

SEQ ID NO: 4592 - DNA, 22 bp, unidentified
  misc_feature 1..22: note = Description of Unknown: MG29-1-AAVS1-target site-H3 sequence
  misc_feature 1..22: note = Category: DNA sequence of AAVS1 target site
  source 1..22: mol_type = unassigned DNA
cttacgatggagccagagagga

SEQ ID NO: 4593 - DNA, 22 bp, unidentified
  misc_feature 1..22: note = Description of Unknown: MG29-1-AAVS1-target site-A4 sequence
  misc_feature 1..22: note = Category: DNA sequence of AAVS1 target site
  source 1..22: mol_type = unassigned DNA
actgatcctggtgctgcagctt

SEQ ID NO: 4594 - DNA, 22 bp, unidentified
  misc_feature 1..22: note = Description of Unknown: MG29-1-AAVS1-target site-B4 sequence
  misc_feature 1..22: note = Category: DNA sequence of AAVS1 target site
  source 1..22: mol_type = unassigned DNA
gaaaaacaaaatcagaataagt

SEQ ID NO: 4595 - DNA, 22 bp, unidentified
  misc_feature 1..22: note = Description of Unknown: MG29-1-AAVS1-target site-C4 sequence
  misc_feature 1..22: note = Category: DNA sequence of AAVS1 target site
  source 1..22: mol_type = unassigned DNA
gctcttcacctttctagtcccc

SEQ ID NO: 4596 - DNA, 22 bp, unidentified
  misc_feature 1..22: note = Description of Unknown: MG29-1-AAVS1-target site-D4 sequence
  misc_feature 1..22: note = Category: DNA sequence of AAVS1 target site
  source 1..22: mol_type = unassigned DNA
tagtccccaatttatattgttc

SEQ ID NO: 4597 - DNA, 22 bp, unidentified
  misc_feature 1..22: note = Description of Unknown: MG29-1-AAVS1-target site-E4 sequence
  misc_feature 1..22: note = Category: DNA sequence of AAVS1 target site
  source 1..22: mol_type = unassigned DNA
tattgttcctccgtgcgtcagt

SEQ ID NO: 4598 - DNA, 22 bp, unidentified
  misc_feature 1..22: note = Description of Unknown: MG29-1-AAVS1-target site-F4 sequence
  misc_feature 1..22: note = Category: DNA sequence of AAVS1 target site
  source 1..22: mol_type = unassigned DNA
acctgtgagataaggccagtag

SEQ ID NO: 4599 - DNA, 22 bp, unidentified
  misc_feature 1..22: note = Description of Unknown: MG29-1-AAVS1-target site-G4 sequence
  misc_feature 1..22: note = Category: DNA sequence of AAVS1 target site
  source 1..22: mol_type = unassigned DNA
cctgtgagataaggccagtagc

SEQ ID NO: 4600 - RNA, 42 nt, synthetic construct
  misc_feature 1..42: note = Description of Artificial Sequence: Synthetic oligonucleotide
  misc_feature 1..42: note = Category: MG29-1 sgRNA targeting B2M
  misc_feature 1..42: note = Description: MG29-1-B2M-sgRNA-A1
  source 1..42: mol_type = other RNA
taatttctactgttgtagattggcctggaggctatccagcgt

SEQ ID NO: 4601 - RNA, 42 nt, synthetic construct
  misc_feature 1..42: note = Description of Artificial Sequence: Synthetic oligonucleotide
  misc_feature 1..42: note = Category: MG29-1 sgRNA targeting B2M
  misc_feature 1..42: note = Description: MG29-1-B2M-sgRNA-B1
  source 1..42: mol_type = other RNA
taatttctactgttgtagatcccgatattcctcaggtactcc

SEQ ID NO: 4602 - RNA, 42 nt, synthetic construct
  misc_feature 1..42: note = Description of Artificial Sequence: Synthetic oligonucleotide
  misc_feature 1..42: note = Category: MG29-1 sgRNA targeting B2M
  misc_feature 1..42: note = Description: MG29-1-B2M-sgRNA-C1
  source 1..42: mol_type = other RNA
taatttctactgttgtagatccgatattcctcaggtactcca

SEQ ID NO: 4603 - RNA, 42 nt, synthetic construct
  misc_feature 1..42: note = Description of Artificial Sequence: Synthetic oligonucleotide
  misc_feature 1..42: note = Category: MG29-1 sgRNA targeting B2M
  misc_feature 1..42: note = Description: MG29-1-B2M-sgRNA-D1
  source 1..42: mol_type = other RNA
taatttctactgttgtagatctcacgtcatccagcagagaat

SEQ ID NO: 4604 - RNA, 42 nt, synthetic construct
  misc_feature 1..42: note = Description of Artificial Sequence: Synthetic oligonucleotide
  misc_feature 1..42: note = Category: MG29-1 sgRNA targeting B2M
  misc_feature 1..42: note = Description: MG29-1-B2M-sgRNA-E1
  source 1..42: mol_type = other RNA
taatttctactgttgtagatctgaattgctatgtgtctgggt

SEQ ID NO: 4605 - RNA, 42 nt, synthetic construct
  misc_feature 1..42: note = Description of Artificial Sequence: Synthetic oligonucleotide
  misc_feature 1..42: note = Category: MG29-1 sgRNA targeting B2M
  misc_feature 1..42: note = Description: MG29-1-B2M-sgRNA-F1
  source 1..42: mol_type = other RNA
taatttctactgttgtagatatccatccgacattgaagttga

SEQ ID NO: 4606 - RNA, 42 nt, synthetic construct
  misc_feature 1..42: note = Description of Artificial Sequence: Synthetic oligonucleotide
  misc_feature 1..42: note = Category: MG29-1 sgRNA targeting B2M
  misc_feature 1..42: note = Description: MG29-1-B2M-sgRNA-G1
  source 1..42: mol_type = other RNA
taatttctactgttgtagatagcaaggactggtctttctatc

SEQ ID NO: 4607 - RNA, 42 nt, synthetic construct
  misc_feature 1..42: note = Description of Artificial Sequence: Synthetic oligonucleotide
  misc_feature 1..42: note = Category: MG29-1 sgRNA targeting B2M
  misc_feature 1..42: note = Description: MG29-1-B2M-sgRNA-H1
  source 1..42: mol_type = other RNA
taatttctactgttgtagattatctcttgtactacactgaat

SEQ ID NO: 4608 - RNA, 42 nt, synthetic construct
  misc_feature 1..42: note = Description of Artificial Sequence: Synthetic oligonucleotide
  misc_feature 1..42: note = Category: MG29-1 sgRNA targeting B2M
  misc_feature 1..42: note = Description: MG29-1-B2M-sgRNA-A2
  source 1..42: mol_type = other RNA
taatttctactgttgtagattcacagcccaagatagttaagt

SEQ ID NO: 4609 - RNA, 42 nt, synthetic construct
  misc_feature 1..42: note = Description of Artificial Sequence: Synthetic oligonucleotide
  misc_feature 1..42: note = Category: MG29-1 sgRNA targeting B2M
  misc_feature 1..42: note = Description: MG29-1-B2M-sgRNA-B2
  source 1..42: mol_type = other RNA
taatttctactgttgtagattcagtgggggtgaattcagtgt

SEQ ID NO: 4610 - RNA, 42 nt, synthetic construct
  misc_feature 1..42: note = Description of Artificial Sequence: Synthetic oligonucleotide
  misc_feature 1..42: note = Category: MG29-1 sgRNA targeting B2M
  misc_feature 1..42: note = Description: MG29-1-B2M-sgRNA-C2
  source 1..42: mol_type = other RNA
taatttctactgttgtagatcagtgggggtgaattcagtgta

SEQ ID NO: 4611 - RNA, 42 nt, synthetic construct
  misc_feature 1..42: note = Description of Artificial Sequence: Synthetic oligonucleotide
  misc_feature 1..42: note = Category: MG29-1 sgRNA targeting B2M
  misc_feature 1..42: note = Description: MG29-1-B2M-sgRNA-D2
  source 1..42: mol_type = other RNA
taatttctactgttgtagatagtgggggtgaattcagtgtag

SEQ ID NO: 4612 - RNA, 42 nt, synthetic construct
  misc_feature 1..42: note = Description of Artificial Sequence: Synthetic oligonucleotide
  misc_feature 1..42: note = Category: MG29-1 sgRNA targeting B2M
  misc_feature 1..42: note = Description: MG29-1-B2M-sgRNA-E2
  source 1..42: mol_type = other RNA
taatttctactgttgtagattcaattctctctccattcttca

SEQ ID NO: 4613 - RNA, 42 nt, synthetic construct
  misc_feature 1..42: note = Description of Artificial Sequence: Synthetic oligonucleotide
  misc_feature 1..42: note = Category: MG29-1 sgRNA targeting B2M
  misc_feature 1..42: note = Description: MG29-1-B2M-sgRNA-F2
  source 1..42: mol_type = other RNA
taatttctactgttgtagatcaattctctctccattcttcag

SEQ ID NO: 4614 - RNA, 42 nt, synthetic construct
  misc_feature 1..42: note = Description of Artificial Sequence: Synthetic oligonucleotide
  misc_feature 1..42: note = Category: MG29-1 sgRNA targeting B2M
  misc_feature 1..42: note = Description: MG29-1-B2M-sgRNA-G2
  source 1..42: mol_type = other RNA
taatttctactgttgtagataattctctctccattcttcagt

SEQ ID NO: 4615 - RNA, 42 nt, synthetic construct
  misc_feature 1..42: note = Description of Artificial Sequence: Synthetic oligonucleotide
  misc_feature 1..42: note = Category: MG29-1 sgRNA targeting B2M
  misc_feature 1..42: note = Description: MG29-1-B2M-sgRNA-H2
  source 1..42: mol_type = other RNA
taatttctactgttgtagatactttccattctctgctggatg

SEQ ID NO: 4616 - RNA, 42 nt, synthetic construct
  misc_feature 1..42: note = Description of Artificial Sequence: Synthetic oligonucleotide
  misc_feature 1..42: note = Category: MG29-1 sgRNA targeting B2M
  misc_feature 1..42: note = Description: MG29-1-B2M-sgRNA-A3
  source 1..42: mol_type = other RNA
taatttctactgttgtagatcattctctgctggatgacgtga

SEQ ID NO: 4617 - RNA, 42 nt, synthetic construct
  misc_feature 1..42: note = Description of Artificial Sequence: Synthetic oligonucleotide
  misc_feature 1..42: note = Category: MG29-1 sgRNA targeting B2M
  misc_feature 1..42: note = Description: MG29-1-B2M-sgRNA-B3
  source 1..42: mol_type = other RNA
taatttctactgttgtagattctccactgtctttttcataga

SEQ ID NO: 4618 - RNA, 42 nt, synthetic construct
  misc_feature 1..42: note = Description of Artificial Sequence: Synthetic oligonucleotide
  misc_feature 1..42: note = Category: MG29-1 sgRNA targeting B2M
  misc_feature 1..42: note = Description: MG29-1-B2M-sgRNA-C3
  source 1..42: mol_type = other RNA
taatttctactgttgtagatctccactgtctttttcatagat

SEQ ID NO: 4619 - RNA, 42 nt, synthetic construct
  misc_feature 1..42: note = Description of Artificial Sequence: Synthetic oligonucleotide
  misc_feature 1..42: note = Category: MG29-1 sgRNA targeting B2M
  misc_feature 1..42: note = Description: MG29-1-B2M-sgRNA-D3
  source 1..42: mol_type = other RNA
taatttctactgttgtagattccactgtctttttcatagatc

SEQ ID NO: 4620 - RNA, 42 nt, synthetic construct
  misc_feature 1..42: note = Description of Artificial Sequence: Synthetic oligonucleotide
  misc_feature 1..42: note = Category: MG29-1 sgRNA targeting B2M
  misc_feature 1..42: note = Description: MG29-1-B2M-sgRNA-E3
  source 1..42: mol_type = other RNA
taatttctactgttgtagattcatagatcgagacatgtaagc

SEQ ID NO: 4621 - RNA, 42 nt, synthetic construct
  misc_feature 1..42: note = Description of Artificial Sequence: Synthetic oligonucleotide
  misc_feature 1..42: note = Category: MG29-1 sgRNA targeting B2M
  misc_feature 1..42: note = Description: MG29-1-B2M-sgRNA-F3
  source 1..42: mol_type = other RNA
taatttctactgttgtagatcatagatcgagacatgtaagca

SEQ ID NO: 4622 - RNA, 42 nt, synthetic construct; identical to SEQ ID NO: 4600
  misc_feature 1..42: note = Description of Artificial Sequence: Synthetic oligonucleotide
  misc_feature 1..42: note = Category: MG29-1 sgRNA targeting B2M
  misc_feature 1..42: note = Description: MG29-1-B2M-sgRNA-G3
  source 1..42: mol_type = other RNA

SEQ ID NO: 4623 - RNA, 42 nt, synthetic construct
  misc_feature 1..42: note = Description of Artificial Sequence: Synthetic oligonucleotide
  misc_feature 1..42: note = Category: MG29-1 sgRNA targeting B2M
  misc_feature 1..42: note = Description: MG29-1-B2M-sgRNA-H3
  source 1..42: mol_type = other RNA
taatttctactgttgtagatggcggggagcaggggagacctt

SEQ ID NO: 4624 - RNA, 42 nt, synthetic construct
  misc_feature 1..42: note = Description of Artificial Sequence: Synthetic oligonucleotide
  misc_feature 1..42: note = Category: MG29-1 sgRNA targeting B2M
  misc_feature 1..42: note = Description: MG29-1-B2M-sgRNA-A4
  source 1..42: mol_type = other RNA
taatttctactgttgtagatgcctacggcgacgggagggtcg

SEQ ID NO: 4625 - RNA, 42 nt, synthetic construct
  misc_feature 1..42: note = Description of Artificial Sequence: Synthetic oligonucleotide
  misc_feature 1..42: note = Category: MG29-1 sgRNA targeting B2M
  misc_feature 1..42: note = Description: MG29-1-B2M-sgRNA-B4
  source 1..42: mol_type = other RNA
taatttctactgttgtagatgggcgtcgataagcgtcagagc

SEQ ID NO: 4626 - RNA, 42 nt, synthetic construct
  misc_feature 1..42: note = Description of Artificial Sequence: Synthetic oligonucleotide
  misc_feature 1..42: note = Category: MG29-1 sgRNA targeting B2M
  misc_feature 1..42: note = Description: MG29-1-B2M-sgRNA-C4
  source 1..42: mol_type = other RNA
taatttctactgttgtagattcttccgctctttcgcggggcc

SEQ ID NO: 4627 - RNA, 42 nt, synthetic construct
  misc_feature 1..42: note = Description of Artificial Sequence: Synthetic oligonucleotide
  misc_feature 1..42: note = Category: MG29-1 sgRNA targeting B2M
  misc_feature 1..42: note = Description: MG29-1-B2M-sgRNA-D4
  source 1..42: mol_type = other RNA
taatttctactgttgtagatgcggggcctctggctcccccag

SEQ ID NO: 4628 - RNA, 42 nt, synthetic construct
  misc_feature 1..42: note = Description of Artificial Sequence: Synthetic oligonucleotide
  misc_feature 1..42: note = Category: MG29-1 sgRNA targeting B2M
  misc_feature 1..42: note = Description: MG29-1-B2M-sgRNA-E4
  source 1..42: mol_type = other RNA
taatttctactgttgtagattgaacgcgtggaggggcgcttg

SEQ ID NO: 4629 - RNA, 42 nt, synthetic construct
  misc_feature 1..42: note = Description of Artificial Sequence: Synthetic oligonucleotide
  misc_feature 1..42: note = Category: MG29-1 sgRNA targeting B2M
  misc_feature 1..42: note = Description: MG29-1-B2M-sgRNA-F4
  source 1..42: mol_type = other RNA
taatttctactgttgtagatctccccacggtgtggccccaca

SEQ ID NO: 4630 - RNA, 42 nt, synthetic construct
  misc_feature 1..42: note = Description of Artificial Sequence: Synthetic oligonucleotide
  misc_feature 1..42: note = Category: MG29-1 sgRNA targeting B2M
  misc_feature 1..42: note = Description: MG29-1-B2M-sgRNA-G4
  source 1..42: mol_type = other RNA
taatttctactgttgtagatggacgagcctacccgtccccca

SEQ ID NO: 4631 - RNA, 42 nt, synthetic construct
  misc_feature 1..42: note = Description of Artificial Sequence: Synthetic oligonucleotide
  misc_feature 1..42: note = Category: MG29-1 sgRNA targeting B2M
  misc_feature 1..42: note = Description: MG29-1-B2M-sgRNA-H4
  source 1..42: mol_type = other RNA
taatttctactgttgtagattcccgaccctcccgtcgccgta

SEQ ID NO: 4632 - RNA, 42 nt, synthetic construct
  misc_feature 1..42: note = Description of Artificial Sequence: Synthetic oligonucleotide
  misc_feature 1..42: note = Category: MG29-1 sgRNA targeting B2M
  misc_feature 1..42: note = Description: MG29-1-B2M-sgRNA-A5
  source 1..42: mol_type = other RNA
taatttctactgttgtagatgcgggagcgcatgccttttggc

SEQ ID NO: 4633 - RNA, 42 nt, synthetic construct
  misc_feature 1..42: note = Description of Artificial Sequence: Synthetic oligonucleotide
  misc_feature 1..42: note = Category: MG29-1 sgRNA targeting B2M
  misc_feature 1..42: note = Description: MG29-1-B2M-sgRNA-B5
  source 1..42: mol_type = other RNA
taatttctactgttgtagatcgggagcgcatgccttttggct

SEQ ID NO: 4634 - RNA, 42 nt, synthetic construct
  misc_feature 1..42: note = Description of Artificial Sequence: Synthetic oligonucleotide
  misc_feature 1..42: note = Category: MG29-1 sgRNA targeting B2M
  misc_feature 1..42: note = Description: MG29-1-B2M-sgRNA-C5
  source 1..42: mol_type = other RNA
taatttctactgttgtagatggctgtaattcgtgcatttttt

SEQ ID NO: 4635 - RNA, 42 nt, synthetic construct
  misc_feature 1..42: note = Description of Artificial Sequence: Synthetic oligonucleotide
  misc_feature 1..42: note = Category: MG29-1 sgRNA targeting B2M
  misc_feature 1..42: note = Description: MG29-1-B2M-sgRNA-D5
  source 1..42: mol_type = other RNA
taatttctactgttgtagatgctgtaattcgtgcattttttt

SEQ ID NO: 4636 - RNA, 42 nt, synthetic construct
  misc_feature 1..42: note = Description of Artificial Sequence: Synthetic oligonucleotide
  misc_feature 1..42: note = Category: MG29-1 sgRNA targeting B2M
  misc_feature 1..42: note = Description: MG29-1-B2M-sgRNA-E5
  source 1..42: mol_type = other RNA
taatttctactgttgtagattttttaagaaaaacgcctgcct

SEQ ID NO: 4637 - RNA, 42 nt, synthetic construct
  misc_feature 1..42: note = Description of Artificial Sequence: Synthetic oligonucleotide
  misc_feature 1..42: note = Category: MG29-1 sgRNA targeting B2M
  misc_feature 1..42: note = Description: MG29-1-B2M-sgRNA-F5
  source 1..42: mol_type = other RNA
taatttctactgttgtagatttttaagaaaaacgcctgcctt

SEQ ID NO: 4638 - RNA, 42 nt, synthetic construct
  misc_feature 1..42: note = Description of Artificial Sequence: Synthetic oligonucleotide
  misc_feature 1..42: note = Category: MG29-1 sgRNA targeting B2M
  misc_feature 1..42: note = Description: MG29-1-B2M-sgRNA-G5
  source 1..42: mol_type = other RNA
taatttctactgttgtagattttaagaaaaacgcctgccttc

SEQ ID NO: 4639 - RNA, 42 nt, synthetic construct
  misc_feature 1..42: note = Description of Artificial Sequence: Synthetic oligonucleotide
  misc_feature 1..42: note = Category: MG29-1 sgRNA targeting B2M
  misc_feature 1..42: note = Description: MG29-1-B2M-sgRNA-H5
  source 1..42: mol_type = other RNA
taatttctactgttgtagatttaagaaaaacgcctgccttct

SEQ ID NO: 4640 - RNA, 42 nt, synthetic construct
  misc_feature 1..42: note = Description of Artificial Sequence: Synthetic oligonucleotide
  misc_feature 1..42: note = Category: MG29-1 sgRNA targeting B2M
  misc_feature 1..42: note = Description: MG29-1-B2M-sgRNA-A6
  source 1..42: mol_type = other RNA
taatttctactgttgtagattaagaaaaacgcctgccttctg

SEQ ID NO: 4641 - RNA, 42 nt, synthetic construct
  misc_feature 1..42: note = Description of Artificial Sequence: Synthetic oligonucleotide
  misc_feature 1..42: note = Category: MG29-1 sgRNA targeting B2M
  misc_feature 1..42: note = Description: MG29-1-B2M-sgRNA-B6
  source 1..42: mol_type = other RNA
taatttctactgttgtagataagaaaaacgcctgccttctgc

SEQ ID NO: 4642 - RNA, 42 nt, synthetic construct
  misc_feature 1..42: note = Description of Artificial Sequence: Synthetic oligonucleotide
  misc_feature 1..42: note = Category: MG29-1 sgRNA targeting B2M
  misc_feature 1..42: note = Description: MG29-1-B2M-sgRNA-C6
  source 1..42: mol_type = other RNA
taatttctactgttgtagatagaaaaacgcctgccttctgcg

SEQ ID NO: 4643 - RNA, 42 nt, synthetic construct
  misc_feature 1..42: note = Description of Artificial Sequence: Synthetic oligonucleotide
  misc_feature 1..42: note = Category: MG29-1 sgRNA targeting B2M
  misc_feature 1..42: note = Description: MG29-1-B2M-sgRNA-D6
  source 1..42: mol_type = other RNA
taatttctactgttgtagatcgtacagagggcttcctctttg

SEQ ID NO: 4644 - RNA, 42 nt, synthetic construct
  misc_feature 1..42: note = Description of Artificial Sequence: Synthetic oligonucleotide
  misc_feature 1..42: note = Category: MG29-1 sgRNA targeting B2M
  misc_feature 1..42: note = Description: MG29-1-B2M-sgRNA-E6
  source 1..42: mol_type = other RNA
taatttctactgttgtagatgtacagagggcttcctctttgg

SEQ ID NO: 4645 - RNA, 42 nt, synthetic construct
  misc_feature 1..42: note = Description of Artificial Sequence: Synthetic oligonucleotide
  misc_feature 1..42: note = Category: MG29-1 sgRNA targeting B2M
  misc_feature 1..42: note = Description: MG29-1-B2M-sgRNA-F6
  source 1..42: mol_type = other RNA
taatttctactgttgtagatgctctttgcctggttgtttcca

SEQ ID NO: 4646 - RNA, 42 nt, synthetic construct
  misc_feature 1..42: note = Description of Artificial Sequence: Synthetic oligonucleotide
  misc_feature 1..42: note = Category: MG29-1 sgRNA targeting B2M
  misc_feature 1..42: note = Description: MG29-1-B2M-sgRNA-G6
  source 1..42: mol_type = other RNA
taatttctactgttgtagatcctggttgtttccaagatgtac

SEQ ID NO: 4647 - RNA, 42 nt, synthetic construct
  misc_feature 1..42: note = Description of Artificial Sequence: Synthetic oligonucleotide
  misc_feature 1..42: note = Category: MG29-1 sgRNA targeting B2M
  misc_feature 1..42: note = Description: MG29-1-B2M-sgRNA-H6
  source 1..42: mol_type = other RNA
taatttctactgttgtagatcaagatgtactgtgcctcttac

SEQ ID NO: 4648 - RNA, 42 nt, synthetic construct
  misc_feature 1..42: note = Description of Artificial Sequence: Synthetic oligonucleotide
  misc_feature 1..42: note = Category: MG29-1 sgRNA targeting B2M
  misc_feature 1..42: note = Description: MG29-1-B2M-sgRNA-A7
  source 1..42: mol_type = other RNA
taatttctactgttgtagatcaaaaccgaaagtaagaggcac

SEQ ID NO: 4649 - RNA, 42 nt, synthetic construct
  misc_feature 1..42: note = Description of Artificial Sequence: Synthetic oligonucleotide
  misc_feature 1..42: note = Category: MG29-1 sgRNA targeting B2M
  misc_feature 1..42: note = Description: MG29-1-B2M-sgRNA-B7
  source 1..42: mol_type = other RNA
taatttctactgttgtagataaaaccgaaagtaagaggcaca

SEQ ID NO: 4650 - RNA, 42 nt, synthetic construct
  misc_feature 1..42: note = Description of Artificial Sequence: Synthetic oligonucleotide
  misc_feature 1..42: note = Category: MG29-1 sgRNA targeting B2M
  misc_feature 1..42: note = Description: MG29-1-B2M-sgRNA-C7
  source 1..42: mol_type = other RNA
taatttctactgttgtagatctctggagaatctcacgcagaa

SEQ ID NO: 4651 - RNA, 42 nt, synthetic construct
  misc_feature 1..42: note = Description of Artificial Sequence: Synthetic oligonucleotide
  misc_feature 1..42: note = Category: MG29-1 sgRNA targeting B2M
  misc_feature 1..42: note = Description: MG29-1-B2M-sgRNA-D7
  source 1..42: mol_type = other RNA
taatttctactgttgtagattcttaaaaaaaaatgcacgaat

SEQ ID NO: 4652 - RNA, 42 nt, synthetic construct
  misc_feature 1..42: note = Description of Artificial Sequence: Synthetic oligonucleotide
  misc_feature 1..42: note = Category: MG29-1 sgRNA targeting B2M
  misc_feature 1..42: note = Description: MG29-1-B2M-sgRNA-E7
  source 1..42: mol_type = other RNA
taatttctactgttgtagatcttaaaaaaaaatgcacgaatt

SEQ ID NO: 4653 - RNA, 42 nt, synthetic construct
  misc_feature 1..42: note = Description of Artificial Sequence: Synthetic oligonucleotide
  misc_feature 1..42: note = Category: MG29-1 sgRNA targeting B2M
  misc_feature 1..42: note = Description: MG29-1-B2M-sgRNA-F7
  source 1..42: mol_type = other RNA
taatttctactgttgtagatttaaaaaaaaatgcacgaatta

SEQ ID NO: 4654 - RNA, 42 nt, synthetic construct
  misc_feature 1..42: note = Description of Artificial Sequence: Synthetic oligonucleotide
  misc_feature 1..42: note = Category: MG29-1 sgRNA targeting B2M
  misc_feature 1..42: note = Description: MG29-1-B2M-sgRNA-G7
  source 1..42: mol_type = other RNA
taatttctactgttgtagatttcttcaaaatggaggtggctt

SEQ ID NO: 4655 - RNA, 42 nt, synthetic construct
  misc_feature 1..42: note = Description of Artificial Sequence: Synthetic oligonucleotide
  misc_feature 1..42: note = Category: MG29-1 sgRNA targeting B2M
  misc_feature 1..42: note = Description: MG29-1-B2M-sgRNA-H7
  source 1..42: mol_type = other RNA
taatttctactgttgtagatgccagagtggaaatggaattgg

SEQ ID NO: 4656 - RNA, 42 nt, synthetic construct
  misc_feature 1..42: note = Description of Artificial Sequence: Synthetic oligonucleotide
  misc_feature 1..42: note = Category: MG29-1 sgRNA targeting B2M
  misc_feature 1..42: note = Description: MG29-1-B2M-sgRNA-A8
  source 1..42: mol_type = other RNA
taatttctactgttgtagatgagtacctgaggaatatcggga

SEQ ID NO: 4657 - RNA, 42 nt, synthetic construct
  misc_feature 1..42: note = Description of Artificial Sequence: Synthetic oligonucleotide
  misc_feature 1..42: note = Category: MG29-1 sgRNA targeting B2M
  misc_feature 1..42: note = Description: MG29-1-B2M-sgRNA-B8
  source 1..42: mol_type = other RNA
taatttctactgttgtagatacttggggctaacttggtgtca

SEQ ID NO: 4658 - RNA, 42 nt, synthetic construct
  misc_feature 1..42: note = Description of Artificial Sequence: Synthetic oligonucleotide
  misc_feature 1..42: note = Category: MG29-1 sgRNA targeting B2M
  misc_feature 1..42: note = Description: MG29-1-B2M-sgRNA-C8
  source 1..42: mol_type = other RNA
taatttctactgttgtagatcatttggtcatcgatttctccc

SEQ ID NO: 4659 - RNA, 42 nt, synthetic construct
  misc_feature 1..42: note = Description of Artificial Sequence: Synthetic oligonucleotide
  misc_feature 1..42: note = Category: MG29-1 sgRNA targeting B2M
  misc_feature 1..42: note = Description: MG29-1-B2M-sgRNA-D8
  source 1..42: mol_type = other RNA
taatttctactgttgtagatgtcatcgatttctcccaattcc

SEQ ID NO: 4660 - RNA, 42 nt, synthetic construct
  misc_feature 1..42: note = Description of Artificial Sequence: Synthetic oligonucleotide
  misc_feature 1..42: note = Category: MG29-1 sgRNA targeting B2M
  misc_feature 1..42: note = Description: MG29-1-B2M-sgRNA-E8
  source 1..42: mol_type = other RNA
taatttctactgttgtagattcccaattccatttccactctg

SEQ ID NO: 4661 - RNA, 42 nt, synthetic construct
  misc_feature 1..42: note = Description of Artificial Sequence: Synthetic oligonucleotide
  misc_feature 1..42: note = Category: MG29-1 sgRNA targeting B2M
  misc_feature 1..42: note = Description: MG29-1-B2M-sgRNA-F8
  source 1..42: mol_type = other RNA
taatttctactgttgtagatcactctggccaaatgagcttcc

SEQ ID NO: 4662 - RNA, 42 nt, synthetic construct
  misc_feature 1..42: note = Description of Artificial Sequence: Synthetic oligonucleotide
  misc_feature 1..42: note = Category: MG29-1 sgRNA targeting B2M
  misc_feature 1..42: note = Description: MG29-1-B2M-sgRNA-G8
  source 1..42: mol_type = other RNA
taatttctactgttgtagatgaagaataaaccgtgacttggt

SEQ ID NO: 4663 - RNA, 42 nt, synthetic construct
  misc_feature 1..42: note = Description of Artificial Sequence: Synthetic oligonucleotide
  misc_feature 1..42: note = Category: MG29-1 sgRNA targeting B2M
  misc_feature 1..42: note = Description: MG29-1-B2M-sgRNA-H8
  source 1..42: mol_type = other RNA
taatttctactgttgtagataagaataaaccgtgacttggta

SEQ ID NO: 4664 - RNA, 42 nt, synthetic construct
  misc_feature 1..42: note = Description of Artificial Sequence: Synthetic oligonucleotide
  misc_feature 1..42: note = Category: MG29-1 sgRNA targeting B2M
  misc_feature 1..42: note = Description: MG29-1-B2M-sgRNA-A9
  source 1..42: mol_type = other RNA
taatttctactgttgtagatcctcataattcctctatacatg

SEQ ID NO: 4665 - RNA, 42 nt, synthetic construct
  misc_feature 1..42: note = Description of Artificial Sequence: Synthetic oligonucleotide
  misc_feature 1..42: note = Category: MG29-1 sgRNA targeting B2M
  misc_feature 1..42: note = Description: MG29-1-B2M-sgRNA-B9
  source 1..42: mol_type = other RNA
taatttctactgttgtagatttgttttttttctagcagattt

SEQ ID NO: 4666 - RNA, 42 nt, synthetic construct
  misc_feature 1..42: note = Description of Artificial Sequence: Synthetic oligonucleotide
  misc_feature 1..42: note = Category: MG29-1 sgRNA targeting B2M
  misc_feature 1..42: note = Description: MG29-1-B2M-sgRNA-C9
  source 1..42: mol_type = other RNA
taatttctactgttgtagattgttttttttctagcagatttc

SEQ ID NO: 4667 - RNA, 42 nt, synthetic construct
  misc_feature 1..42: note = Description of Artificial Sequence: Synthetic oligonucleotide
  misc_feature 1..42: note = Category: MG29-1 sgRNA targeting B2M
  misc_feature 1..42: note = Description: MG29-1-B2M-sgRNA-D9
  source 1..42: mol_type = other RNA
taatttctactgttgtagatgttttttttctagcagatttct

SEQ ID NO: 4668 - RNA, 42 nt, synthetic construct
  misc_feature 1..42: note = Description of Artificial Sequence: Synthetic oligonucleotide
  misc_feature 1..42: note = Category: MG29-1 sgRNA targeting B2M
  misc_feature 1..42: note = Description: MG29-1-B2M-sgRNA-E9
  source 1..42: mol_type = other RNA
taatttctactgttgtagatttttttttctagcagatttcta

SEQ ID NO: 4669 - RNA, 42 nt, synthetic construct
  misc_feature 1..42: note = Description of Artificial Sequence: Synthetic oligonucleotide
  misc_feature 1..42: note = Category: MG29-1 sgRNA targeting B2M
  misc_feature 1..42: note = Description: MG29-1-B2M-sgRNA-F9
  source 1..42: mol_type = other RNA
taatttctactgttgtagatttttctagcagatttctagcag

SEQ ID NO: 4670 - RNA, 42 nt, synthetic construct
  misc_feature 1..42: note = Description of Artificial Sequence: Synthetic oligonucleotide
  misc_feature 1..42: note = Category: MG29-1 sgRNA targeting B2M
  misc_feature 1..42: note = Description: MG29-1-B2M-sgRNA-G9
  source 1..42: mol_type = other RNA
taatttctactgttgtagattttctagcagatttctagcagt

SEQ ID NO: 4671 - RNA, 42 nt, synthetic construct
  misc_feature 1..42: note = Description of Artificial Sequence: Synthetic oligonucleotide
  misc_feature 1..42: note = Category: MG29-1 sgRNA targeting B2M
  misc_feature 1..42: note = Description: MG29-1-B2M-sgRNA-H9
  source 1..42: mol_type = other RNA
taatttctactgttgtagatttctagcagatttctagcagta

SEQ ID NO: 4672 - RNA, 42 nt, synthetic construct
  misc_feature 1..42: note = Description of Artificial Sequence: Synthetic oligonucleotide
  misc_feature 1..42: note = Category: MG29-1 sgRNA targeting B2M
  misc_feature 1..42: note = Description: MG29-1-B2M-sgRNA-A10
  source 1..42: mol_type = other RNA
taatttctactgttgtagattctagcagatttctagcagtat

SEQ ID NO: 4673 - RNA, 42 nt, synthetic construct
  misc_feature 1..42: note = Description of Artificial Sequence: Synthetic oligonucleotide
  misc_feature 1..42: note = Category: MG29-1 sgRNA targeting B2M
  misc_feature 1..42: note = Description: MG29-1-B2M-sgRNA-B10
  source 1..42: mol_type = other RNA
taatttctactgttgtagatctagcagatttctagcagtatc

SEQ ID NO: 4674 - RNA, 42 nt, synthetic construct
  misc_feature 1..42: note = Description of Artificial Sequence: Synthetic oligonucleotide
  misc_feature 1..42: note = Category: MG29-1 sgRNA targeting B2M
  misc_feature 1..42: note = Description: MG29-1-B2M-sgRNA-C10
  source 1..42: mol_type = other RNA
taatttctactgttgtagattagcagatttctagcagtatct

SEQ ID NO: 4675 - RNA, 42 nt, synthetic construct
  misc_feature 1..42: note = Description of Artificial Sequence: Synthetic oligonucleotide
  misc_feature 1..42: note = Category: MG29-1 sgRNA targeting B2M
  misc_feature 1..42: note = Description: MG29-1-B2M-sgRNA-D10
  source 1..42: mol_type = other RNA
taatttctactgttgtagattagcagtatcttctgtcactgg

SEQ ID NO: 4676 - DNA, 22 bp, unidentified
  misc_feature 1..22: note = Description of Unknown: MG29-1-B2M-target site-A1 sequence
  misc_feature 1..22: note = Category: DNA sequence of B2M target site
  source 1..22: mol_type = unassigned DNA
tggcctggaggctatccagcgt

SEQ ID NO: 4677 - DNA, 22 bp, unidentified
  misc_feature 1..22: note = Description of Unknown: MG29-1-B2M-target site-B1 sequence
  misc_feature 1..22: note = Category: DNA sequence of B2M target site
  source 1..22: mol_type = unassigned DNA
cccgatattcctcaggtactcc

SEQ ID NO: 4678 - DNA, 22 bp, unidentified
  misc_feature 1..22: note = Description of Unknown: MG29-1-B2M-target site-C1 sequence
  misc_feature 1..22: note = Category: DNA sequence of B2M target site
  source 1..22: mol_type = unassigned DNA
ccgatattcctcaggtactcca

SEQ ID NO: 4679 - DNA, 22 bp, unidentified
  misc_feature 1..22: note = Description of Unknown: MG29-1-B2M-target site-D1 sequence
  misc_feature 1..22: note = Category: DNA sequence of B2M target site
  source 1..22: mol_type = unassigned DNA
ctcacgtcatccagcagagaat

SEQ ID NO: 4680 - DNA, 22 bp, unidentified
  misc_feature 1..22: note = Description of Unknown: MG29-1-B2M-target site-E1 sequence
  misc_feature 1..22: note = Category: DNA sequence of B2M target site
  source 1..22: mol_type = unassigned DNA
ctgaattgctatgtgtctgggt

SEQ ID NO: 4681 - DNA, 22 bp, unidentified
  misc_feature 1..22: note = Description of Unknown: MG29-1-B2M-target site-F1 sequence
  misc_feature 1..22: note = Category: DNA sequence of B2M target site
  source 1..22: mol_type = unassigned DNA
atccatccgacattgaagttga

SEQ ID NO: 4682 - DNA, 22 bp, unidentified
  misc_feature 1..22: note = Description of Unknown: MG29-1-B2M-target site-G1 sequence
  misc_feature 1..22: note = Category: DNA sequence of B2M target site
  source 1..22: mol_type = unassigned DNA
agcaaggactggtctttctatc

SEQ ID NO: 4683 - DNA, 22 bp, unidentified
  misc_feature 1..22: note = Description of Unknown: MG29-1-B2M-target site-H1 sequence
  misc_feature 1..22: note = Category: DNA sequence of B2M target site
  source 1..22: mol_type = unassigned DNA
tatctcttgtactacactgaat

SEQ ID NO: 4684 - DNA, 22 bp, unidentified
  misc_feature 1..22: note = Description of Unknown: MG29-1-B2M-target site-A2 sequence
  misc_feature 1..22: note = Category: DNA sequence of B2M target site
  source 1..22: mol_type = unassigned DNA
tcacagcccaagatagttaagt

SEQ ID NO: 4685 - DNA, 22 bp, unidentified
  misc_feature 1..22: note = Description of Unknown: MG29-1-B2M-target site-B2 sequence
  misc_feature 1..22: note = Category: DNA sequence of B2M target site
  source 1..22: mol_type = unassigned DNA
tcagtgggggtgaattcagtgt

SEQ ID NO: 4686 - DNA, 22 bp, unidentified
  misc_feature 1..22: note = Description of Unknown: MG29-1-B2M-target site-C2 sequence
  misc_feature 1..22: note = Category: DNA sequence of B2M target site
  source 1..22: mol_type = unassigned DNA
cagtgggggtgaattcagtgta

SEQ ID NO: 4687 - DNA, 22 bp, unidentified
  misc_feature 1..22: note = Description of Unknown: MG29-1-B2M-target site-D2 sequence
  misc_feature 1..22: note = Category: DNA sequence of B2M target site
  source 1..22: mol_type = unassigned DNA
agtgggggtgaattcagtgtag

SEQ ID NO: 4688 - DNA, 22 bp, unidentified
  misc_feature 1..22: note = Description of Unknown: MG29-1-B2M-target site-E2 sequence
  misc_feature 1..22: note = Category: DNA sequence of B2M target site
  source 1..22: mol_type = unassigned DNA
tcaattctctctccattcttca

SEQ ID NO: 4689 - DNA, 22 bp, unidentified
  misc_feature 1..22: note = Description of Unknown: MG29-1-B2M-target site-F2 sequence
  misc_feature 1..22: note = Category: DNA sequence of B2M target site
  source 1..22: mol_type = unassigned DNA
caattctctctccattcttcag

SEQ ID NO: 4690 - DNA, 22 bp, unidentified
  misc_feature 1..22: note = Description of Unknown: MG29-1-B2M-target site-G2 sequence
  misc_feature 1..22: note = Category: DNA sequence of B2M target site
  source 1..22: mol_type = unassigned DNA
aattctctctccattcttcagt

SEQ ID NO: 4691 - DNA, 22 bp, unidentified
  misc_feature 1..22: note = Description of Unknown: MG29-1-B2M-target site-H2 sequence
  misc_feature 1..22: note = Category: DNA sequence of B2M target site
  source 1..22: mol_type = unassigned DNA
actttccattctctgctggatg

SEQ ID NO: 4692 - DNA, 22 bp, unidentified
  misc_feature 1..22: note = Description of Unknown: MG29-1-B2M-target site-A3 sequence
  misc_feature 1..22: note = Category: DNA sequence of B2M target site
  source 1..22: mol_type = unassigned DNA
cattctctgctggatgacgtga

SEQ ID NO: 4693 - DNA, 22 bp, unidentified
  misc_feature 1..22: note = Description of Unknown: MG29-1-B2M-target site-B3 sequence
  misc_feature 1..22: note = Category: DNA sequence of B2M target site
  source 1..22: mol_type = unassigned DNA
tctccactgtctttttcataga

SEQ ID NO: 4694 - DNA, 22 bp, unidentified
  misc_feature 1..22: note = Description of Unknown: MG29-1-B2M-target site-C3 sequence
  misc_feature 1..22: note = Category: DNA sequence of B2M target site
  source 1..22: mol_type = unassigned DNA
ctccactgtctttttcatagat

SEQ ID NO: 4695 - DNA, 22 bp, unidentified
  misc_feature 1..22: note = Description of Unknown: MG29-1-B2M-target site-D3 sequence
  misc_feature 1..22: note = Category: DNA sequence of B2M target site
  source 1..22: mol_type = unassigned DNA
tccactgtctttttcatagatc

SEQ ID NO: 4696 - DNA, 22 bp, unidentified
  misc_feature 1..22: note = Description of Unknown: MG29-1-B2M-target site-E3 sequence
  misc_feature 1..22: note = Category: DNA sequence of B2M target site
  source 1..22: mol_type = unassigned DNA
tcatagatcgagacatgtaagc

SEQ ID NO: 4697 - DNA, 22 bp, unidentified
  misc_feature 1..22: note = Description of Unknown: MG29-1-B2M-target site-F3 sequence
  misc_feature 1..22: note = Category: DNA sequence of B2M target site
  source 1..22: mol_type = unassigned DNA
catagatcgagacatgtaagca

SEQ ID NO: 4698 - DNA, 22 bp, unidentified
  misc_feature 1..22: note = Description of Unknown: MG29-1-B2M-target site-G3 sequence
  misc_feature 1..22: note = Category: DNA sequence of B2M target site
  source 1..22: mol_type = unassigned DNA
tggcctggaggctatccagcgt

SEQ ID NO: 4699 - DNA, 22 bp, unidentified
  misc_feature 1..22: note = Description of Unknown: MG29-1-B2M-target site-H3 sequence
  misc_feature 1..22: note = Category: DNA sequence of B2M target site
  source 1..22: mol_type = unassigned DNA
ggcggggagcaggggagacctt

SEQ ID NO: 4700 - DNA, 22 bp, unidentified
  misc_feature 1..22: note = Description of Unknown: MG29-1-B2M-target site-A4 sequence
  misc_feature 1..22: note = Category: DNA sequence of B2M target site
  source 1..22: mol_type = unassigned DNA
gcctacggcgacgggagggtcg

SEQ ID NO: 4701 - DNA, 22 bp, unidentified
  misc_feature 1..22: note = Description of Unknown: MG29-1-B2M-target site-B4 sequence
  misc_feature 1..22: note = Category: DNA sequence of B2M target site
  source 1..22: mol_type = unassigned DNA
gggcgtcgataagcgtcagagc

SEQ ID NO: 4702 - DNA, 22 bp, unidentified
  misc_feature 1..22: note = Description of Unknown: MG29-1-B2M-target site-C4 sequence
  misc_feature 1..22: note = Category: DNA sequence of B2M target site
  source 1..22: mol_type = unassigned DNA
tcttccgctctttcgcggggcc

SEQ ID NO: 4703 - DNA, 22 bp, unidentified
  misc_feature 1..22: note = Description of Unknown: MG29-1-B2M-target site-D4 sequence
  misc_feature 1..22: note = Category: DNA sequence of B2M target site
  source 1..22: mol_type = unassigned DNA
gcggggcctctggctcccccag

SEQ ID NO: 4704 - DNA, 22 bp, unidentified
  misc_feature 1..22: note = Description of Unknown: MG29-1-B2M-target site-E4 sequence
  misc_feature 1..22: note = Category: DNA sequence of B2M target site
  source 1..22: mol_type = unassigned DNA
tgaacgcgtggaggggcgcttg

SEQ ID NO: 4705 - DNA, 22 bp, unidentified
  misc_feature 1..22: note = Description of Unknown: MG29-1-B2M-target site-F4 sequence
  misc_feature 1..22: note = Category: DNA sequence of B2M target site
  source 1..22: mol_type = unassigned DNA
ctccccacggtgtggccccaca

SEQ ID NO: 4706 - DNA, 22 bp, unidentified
  misc_feature 1..22: note = Description of Unknown: MG29-1-B2M-target site-G4 sequence
  misc_feature 1..22: note = Category: DNA sequence of B2M target site
  source 1..22: mol_type = unassigned DNA
ggacgagcctacccgtccccca

SEQ ID NO: 4707 - DNA, 22 bp, unidentified
  misc_feature 1..22: note = Description of Unknown: MG29-1-B2M-target site-H4 sequence
  misc_feature 1..22: note = Category: DNA sequence of B2M target site
  source 1..22: mol_type = unassigned DNA
tcccgaccctcccgtcgccgta

SEQ ID NO: 4708 - DNA, 22 bp, unidentified
  misc_feature 1..22: note = Description of Unknown: MG29-1-B2M-target site-A5 sequence
  misc_feature 1..22: note = Category: DNA sequence of B2M target site
  source 1..22: mol_type = unassigned DNA
gcgggagcgcatgccttttggc

SEQ ID NO: 4709 - DNA, 22 bp, unidentified
  misc_feature 1..22: note = Description of Unknown: MG29-1-B2M-target site-B5 sequence
  misc_feature 1..22: note = Category: DNA sequence of B2M target site
  source 1..22: mol_type = unassigned DNA
cgggagcgcatgccttttggct

SEQ ID NO: 4710 - DNA, 22 bp, unidentified
  misc_feature 1..22: note = Description of Unknown: MG29-1-B2M-target site-C5 sequence
  misc_feature 1..22: note = Category: DNA sequence of B2M target site
  source 1..22: mol_type = unassigned DNA
ggctgtaattcgtgcatttttt

SEQ ID NO: 4711 - DNA, 22 bp, unidentified
  misc_feature 1..22: note = Description of Unknown: MG29-1-B2M-target site-D5 sequence
  misc_feature 1..22: note = Category: DNA sequence of B2M target site
  source 1..22: mol_type = unassigned DNA
gctgtaattcgtgcattttttt

SEQ ID NO: 4712 - DNA, 22 bp, unidentified
  misc_feature 1..22: note = Description of Unknown: MG29-1-B2M-target site-E5 sequence
  misc_feature 1..22: note = Category: DNA sequence of B2M target site
  source 1..22: mol_type = unassigned DNA
tttttaagaaaaacgcctgcct

SEQ ID NO: 4713 - DNA, 22 bp, unidentified
  misc_feature 1..22: note = Description of Unknown: MG29-1-B2M-target site-F5 sequence
  misc_feature 1..22: note = Category: DNA sequence of B2M target site
  source 1..22: mol_type = unassigned DNA
ttttaagaaaaacgcctgcctt

SEQ ID NO: 4714 - DNA, 22 bp, unidentified
  misc_feature 1..22: note = Description of Unknown: MG29-1-B2M-target site-G5 sequence
  misc_feature 1..22: note = Category: DNA sequence of B2M target site
  source 1..22: mol_type = unassigned DNA
tttaagaaaaacgcctgccttc

SEQ ID NO: 4715 - DNA, 22 bp, unidentified
  misc_feature 1..22: note = Description of Unknown: MG29-1-B2M-target site-H5 sequence
  misc_feature 1..22: note = Category: DNA sequence of B2M target site
  source 1..22: mol_type = unassigned DNA
ttaagaaaaacgcctgccttct

SEQ ID NO: 4716 - DNA, 22 bp, unidentified
  misc_feature 1..22: note = Description of Unknown: MG29-1-B2M-target site-A6 sequence
  misc_feature 1..22: note = Category: DNA sequence of B2M target site
  source 1..22: mol_type = unassigned DNA
taagaaaaacgcctgccttctg

SEQ ID NO: 4717 - DNA, 22 bp, unidentified
  misc_feature 1..22: note = Description of Unknown: MG29-1-B2M-target site-B6 sequence
  misc_feature 1..22: note = Category: DNA sequence of B2M target site
  source 1..22: mol_type = unassigned DNA
aagaaaaacgcctgccttctgc

SEQ ID NO: 4718 - DNA, 22 bp, unidentified
  misc_feature 1..22: note = Description of Unknown: MG29-1-B2M-target site-C6 sequence
  misc_feature 1..22: note = Category: DNA sequence of B2M target site
  source 1..22: mol_type = unassigned DNA
agaaaaacgcctgccttctgcg

SEQ ID NO: 4719 - DNA, 22 bp, unidentified
  misc_feature 1..22: note = Description of Unknown: MG29-1-B2M-target site-D6 sequence
  misc_feature 1..22: note = Category: DNA sequence of B2M target site
  source 1..22: mol_type = unassigned DNA
cgtacagagggcttcctctttg

SEQ ID NO: 4720 - DNA, 22 bp, unidentified
  misc_feature 1..22: note = Description of Unknown: MG29-1-B2M-target site-E6 sequence
  misc_feature 1..22: note = Category: DNA sequence of B2M target site
  source 1..22: mol_type = unassigned DNA
gtacagagggcttcctctttgg

SEQ ID NO: 4721 - DNA, 22 bp, unidentified
  misc_feature 1..22: note = Description of Unknown: MG29-1-B2M-target site-F6 sequence
  misc_feature 1..22: note = Category: DNA sequence of B2M target site
  source 1..22: mol_type = unassigned DNA
gctctttgcctggttgtttcca

SEQ ID NO: 4722 - DNA, 22 bp, unidentified
  misc_feature 1..22: note = Description of Unknown: MG29-1-B2M-target site-G6 sequence
  misc_feature 1..22: note = Category: DNA sequence of B2M target site
  source 1..22: mol_type = unassigned DNA
cctggttgtttccaagatgtac

SEQ ID NO: 4723 - DNA, 22 bp, unidentified
  misc_feature 1..22: note = Description of Unknown: MG29-1-B2M-target site-H6 sequence
  misc_feature 1..22: note = Category: DNA sequence of B2M target site
  source 1..22: mol_type = unassigned DNA
caagatgtactgtgcctcttac

SEQ ID NO: 4724 - DNA, 22 bp, unidentified
  misc_feature 1..22: note = Description of Unknown: MG29-1-B2M-target site-A7 sequence
  misc_feature 1..22: note = Category: DNA sequence of B2M target site
  source 1..22: mol_type = unassigned DNA
caaaaccgaaagtaagaggcac

SEQ ID NO: 4725 - DNA, 22 bp, unidentified
  misc_feature 1..22: note = Description of Unknown: MG29-1-B2M-target site-B7 sequence
  misc_feature 1..22: note = Category: DNA sequence of B2M target site
  source 1..22: mol_type = unassigned DNA
aaaaccgaaagtaagaggcaca

SEQ ID NO: 4726 - DNA, 22 bp, unidentified
  misc_feature 1..22: note = Description of Unknown: MG29-1-B2M-target site-C7 sequence
  misc_feature 1..22: note = Category: DNA sequence of B2M target site
  source 1..22: mol_type = unassigned DNA
ctctggagaatctcacgcagaa

SEQ ID NO: 4727 - DNA, 22 bp, unidentified
  misc_feature 1..22: note = Description of Unknown: MG29-1-B2M-target site-D7 sequence
  misc_feature 1..22: note = Category: DNA sequence of B2M target site
  source 1..22: mol_type = unassigned DNA
tcttaaaaaaaaatgcacgaat

SEQ ID NO: 4728 - DNA, 22 bp, unidentified
  misc_feature 1..22: note = Description of Unknown: MG29-1-B2M-target site-E7 sequence
  misc_feature 1..22: note = Category: DNA sequence of B2M target site
  source 1..22: mol_type = unassigned DNA
cttaaaaaaaaatgcacgaatt

SEQ ID NO: 4729 - DNA, 22 bp, unidentified
  misc_feature 1..22: note = Description of Unknown: MG29-1-B2M-target site-F7 sequence
  misc_feature 1..22: note = Category: DNA sequence of B2M target site
  source 1..22: mol_type = unassigned DNA
ttaaaaaaaaatgcacgaatta

SEQ ID NO: 4730 - DNA, 22 bp, unidentified
  misc_feature 1..22: note = Description of Unknown: MG29-1-B2M-target site-G7 sequence
  misc_feature 1..22: note = Category: DNA sequence of B2M target site
  source 1..22: mol_type = unassigned DNA
ttcttcaaaatggaggtggctt

SEQ ID NO: 4731 - DNA, 22 bp, unidentified
  misc_feature 1..22: note = Description of Unknown: MG29-1-B2M-target site-H7 sequence
  misc_feature 1..22: note = Category: DNA sequence of B2M target site
  source 1..22: mol_type = unassigned DNA
gccagagtggaaatggaattgg

SEQ ID NO: 4732 - DNA, 22 bp, unidentified
  misc_feature 1..22: note = Description of Unknown: MG29-1-B2M-target site-A8 sequence
  misc_feature 1..22: note = Category: DNA sequence of B2M target site
  source 1..22: mol_type = unassigned DNA
gagtacctgaggaatatcggga

SEQ ID NO: 4733 - DNA, 22 bp, unidentified
  misc_feature 1..22: note = Description of Unknown: MG29-1-B2M-target site-B8 sequence
  misc_feature 1..22: note = Category: DNA sequence of B2M target site
  source 1..22: mol_type = unassigned DNA
acttggggctaacttggtgtca

SEQ ID NO: 4734 - DNA, 22 bp, unidentified
  misc_feature 1..22: note = Description of Unknown: MG29-1-B2M-target site-C8 sequence
  misc_feature 1..22: note = Category: DNA sequence of B2M target site
  source 1..22: mol_type = unassigned DNA
catttggtcatcgatttctccc

SEQ ID NO: 4735 - DNA, 22 bp, unidentified
  misc_feature 1..22: note = Description of Unknown: MG29-1-B2M-target site-D8 sequence
  misc_feature 1..22: note = Category: DNA sequence of B2M target site
  source 1..22: mol_type = unassigned DNA
gtcatcgatttctcccaattcc

SEQ ID NO: 4736 - DNA, 22 bp, unidentified
  misc_feature 1..22: note = Description of Unknown: MG29-1-B2M-target site-E8 sequence
  misc_feature 1..22: note = Category: DNA sequence of B2M target site
  source 1..22: mol_type = unassigned DNA
tcccaattccatttccactctg

SEQ ID NO: 4737 - DNA, 22 bp, unidentified
  misc_feature 1..22: note = Description of Unknown: MG29-1-B2M-target site-F8 sequence
  misc_feature 1..22: note = Category: DNA sequence of B2M target site
  source 1..22: mol_type = unassigned DNA
cactctggccaaatgagcttcc

SEQ ID NO: 4738 - DNA, 22 bp, unidentified
  misc_feature 1..22: note = Description of Unknown: MG29-1-B2M-target site-G8 sequence
  misc_feature 1..22: note = Category: DNA sequence of B2M target site
  source 1..22: mol_type = unassigned DNA
gaagaataaaccgtgacttggt

SEQ ID NO: 4739 - DNA, 22 bp, unidentified
  misc_feature 1..22: note = Description of Unknown: MG29-1-B2M-target site-H8 sequence
  misc_feature 1..22: note = Category: DNA sequence of B2M target site
  source 1..22: mol_type = unassigned DNA
aagaataaaccgtgacttggta

SEQ ID NO: 4740 - DNA, 22 bp, unidentified
  misc_feature 1..22: note = Description of Unknown: MG29-1-B2M-target site-A9 sequence
  misc_feature 1..22: note = Category: DNA sequence of B2M target site
  source 1..22: mol_type = unassigned DNA
cctcataattcctctatacatg

SEQ ID NO: 4741 - DNA, 22 bp, unidentified
  misc_feature 1..22: note = Description of Unknown: MG29-1-B2M-target site-B9 sequence
  misc_feature 1..22: note = Category: DNA sequence of B2M target site
  source 1..22: mol_type = unassigned DNA
ttgttttttttctagcagattt

SEQ ID NO: 4742 - DNA, 22 bp, unidentified
  misc_feature 1..22: note = Description of Unknown: MG29-1-B2M-target site-C9 sequence
  misc_feature 1..22: note = Category: DNA sequence of B2M target site
  source 1..22: mol_type = unassigned DNA
tgttttttttctagcagatttc

SEQ ID NO: 4743 - DNA, 22 bp, unidentified
  misc_feature 1..22: note = Description of Unknown: MG29-1-B2M-target site-D9 sequence
  misc_feature 1..22: note = Category: DNA sequence of B2M target site
  source 1..22: mol_type = unassigned DNA
gttttttttctagcagatttct

SEQ ID NO: 4744 - DNA, 22 bp, unidentified
  misc_feature 1..22: note = Description of Unknown: MG29-1-B2M-target site-E9 sequence
  misc_feature 1..22: note = Category: DNA sequence of B2M target site
  source 1..22: mol_type = unassigned DNA
ttttttttctagcagatttcta

SEQ ID NO: 4745 - DNA, 22 bp, unidentified
  misc_feature 1..22: note = Description of Unknown: MG29-1-B2M-target site-F9 sequence
  misc_feature 1..22: note = Category: DNA sequence of B2M target site
  source 1..22: mol_type = unassigned DNA
ttttctagcagatttctagcag

SEQ ID NO: 4746 - DNA, 22 bp, unidentified
  misc_feature 1..22: note = Description of Unknown: MG29-1-B2M-target site-G9 sequence
  misc_feature 1..22: note = Category: DNA sequence of B2M target site
  source 1..22: mol_type = unassigned DNA
tttctagcagatttctagcagt

SEQ ID NO: 4747 - DNA, 22 bp, unidentified
  misc_feature 1..22: note = Description of Unknown: MG29-1-B2M-target site-H9 sequence
  misc_feature 1..22: note = Category: DNA sequence of B2M target site
  source 1..22: mol_type = unassigned DNA
ttctagcagatttctagcagta

SEQ ID NO: 4748 - DNA, 22 bp, unidentified
  misc_feature 1..22: note = Description of Unknown: MG29-1-B2M-target site-A10 sequence
  misc_feature 1..22: note = Category: DNA sequence of B2M target site
  source 1..22: mol_type = unassigned DNA
tctagcagatttctagcagtat

SEQ ID NO: 4749 - DNA, 22 bp, unidentified
  misc_feature 1..22: note = Description of Unknown: MG29-1-B2M-target site-B10 sequence
  misc_feature 1..22: note = Category: DNA sequence of B2M target site
  source 1..22: mol_type = unassigned DNA
ctagcagatttctagcagtatc

SEQ ID NO: 4750 - DNA, 22 bp, unidentified
  misc_feature 1..22: note = Description of Unknown: MG29-1-B2M-target site-C10 sequence
  misc_feature 1..22: note = Category: DNA sequence of B2M target site
  source 1..22: mol_type = unassigned DNA
tagcagatttctagcagtatct

SEQ ID NO: 4751 - DNA, 22 bp, unidentified
  misc_feature 1..22: note = Description of Unknown: MG29-1-B2M-target site-D10 sequence
  misc_feature 1..22: note = Category: DNA sequence of B2M target site
  source 1..22: mol_type = unassigned DNA
tagcagtatcttctgtcactgg

SEQ ID NO: 4752 - RNA, 42 nt, synthetic construct
  misc_feature 1..42: note = Description of Artificial Sequence: Synthetic oligonucleotide
  misc_feature 1..42: note = Category: MG29-1 sgRNA targeting CD2
  misc_feature 1..42: note = Description: MG29-1-CD2-sgRNA-A1
  source 1..42: mol_type = other RNA
taatttctactgttgtagatcatgtaaatttgtagccagctt

SEQ ID NO: 4753 - RNA, 42 nt, synthetic construct
  misc_feature 1..42: note = Description of Artificial Sequence: Synthetic oligonucleotide
  misc_feature 1..42: note = Category: MG29-1 sgRNA targeting CD2
  misc_feature 1..42: note = Description: MG29-1-CD2-sgRNA-B1
  source 1..42: mol_type = other RNA
taatttctactgttgtagattagccagcttccttctgatttt

SEQ ID NO: 4754 - RNA, 42 nt, synthetic construct
  misc_feature 1..42: note = Description of Artificial Sequence: Synthetic oligonucleotide
  misc_feature 1..42: note = Category: MG29-1 sgRNA targeting CD2
  misc_feature 1..42: note = Description: MG29-1-CD2-sgRNA-C1
  source 1..42: mol_type = other RNA
taatttctactgttgtagatactcttatgcttacctttggaa

SEQ ID NO: 4755 - RNA, 42 nt, synthetic construct
  misc_feature 1..42: note = Description of Artificial Sequence: Synthetic oligonucleotide
  misc_feature 1..42: note = Category: MG29-1 sgRNA targeting CD2
  misc_feature 1..42: note = Description: MG29-1-CD2-sgRNA-D1
  source 1..42: mol_type = other RNA
taatttctactgttgtagatgaagaaacattgaaaatcagaa

SEQ ID NO: 4756 - RNA, 42 nt, synthetic construct
  misc_feature 1..42: note = Description of Artificial Sequence: Synthetic oligonucleotide
  misc_feature 1..42: note = Category: MG29-1 sgRNA targeting CD2
  misc_feature 1..42: note = Description: MG29-1-CD2-sgRNA-E1
  source 1..42: mol_type = other RNA
taatttctactgttgtagatgctttttataggtgcagtctcc

SEQ ID NO: 4757 - RNA, 42 nt, synthetic construct
  misc_feature 1..42: note = Description of Artificial Sequence: Synthetic oligonucleotide
  misc_feature 1..42: note = Category: MG29-1 sgRNA targeting CD2
  misc_feature 1..42: note = Description: MG29-1-CD2-sgRNA-F1
  source 1..42: mol_type = other RNA
taatttctactgttgtagatctttttataggtgcagtctcca

SEQ ID NO: 4758 - RNA, 42 nt, synthetic construct
  misc_feature 1..42: note = Description of Artificial Sequence: Synthetic oligonucleotide
  misc_feature 1..42: note = Category: MG29-1 sgRNA targeting CD2
  misc_feature 1..42: note = Description: MG29-1-CD2-sgRNA-G1
  source 1..42: mol_type = other RNA
taatttctactgttgtagattataggtgcagtctccaaagag

SEQ ID NO: 4759 - RNA, 42 nt, synthetic construct
  misc_feature 1..42: note = Description of Artificial Sequence: Synthetic oligonucleotide
  misc_feature 1..42: note = Category: MG29-1 sgRNA targeting CD2
  misc_feature 1..42: note = Description: MG29-1-CD2-sgRNA-H1
  source 1..42: mol_type = other RNA
taatttctactgttgtagatataggtgcagtctccaaagaga

SEQ ID NO: 4760 - RNA, 42 nt, synthetic construct
  misc_feature 1..42: note = Description of Artificial Sequence: Synthetic oligonucleotide
  misc_feature 1..42: note = Category: MG29-1 sgRNA targeting CD2
  misc_feature 1..42: note = Description: MG29-1-CD2-sgRNA-A2
  source 1..42: mol_type = other RNA
taatttctactgttgtagattaggtgcagtctccaaagagat

SEQ ID NO: 4761 - RNA, 42 nt, synthetic construct
  misc_feature 1..42: note = Description of Artificial Sequence: Synthetic oligonucleotide
  misc_feature 1..42: note = Category: MG29-1 sgRNA targeting CD2
  misc_feature 1..42: note = Description: MG29-1-CD2-sgRNA-B2
  source 1..42: mol_type = other RNA
taatttctactgttgtagatcaaatgagtgatgatattgacg

SEQ ID NO: 4762 - RNA, 42 nt, synthetic construct
  misc_feature 1..42: note = Description of Artificial Sequence: Synthetic oligonucleotide
  misc_feature 1..42: note = Category: MG29-1 sgRNA targeting CD2
  misc_feature 1..42: note = Description: MG29-1-CD2-sgRNA-C2
  source 1..42: mol_type = other RNA
taatttctactgttgtagataaatgagtgatgatattgacga

SEQ ID NO: 4763 - RNA, 42 nt, synthetic construct
  misc_feature 1..42: note = Description of Artificial Sequence: Synthetic oligonucleotide
  misc_feature 1..42: note = Category: MG29-1 sgRNA targeting CD2
  misc_feature 1..42: note = Description: MG29-1-CD2-sgRNA-D2
  source 1..42: mol_type = other RNA
taatttctactgttgtagataaggaaaaagatacatataagc

SEQ ID NO: 4764 - RNA, 42 nt, synthetic construct
  misc_feature 1..42: note = Description of Artificial Sequence: Synthetic oligonucleotide
  misc_feature 1..42: note = Category: MG29-1 sgRNA targeting CD2
  misc_feature 1..42: note = Description: MG29-1-CD2-sgRNA-E2
  source 1..42: mol_type = other RNA
taatttctactgttgtagataaaatggaactctgaaaattaa

SEQ ID NO: 4765 - RNA, 42 nt, synthetic construct
  misc_feature 1..42: note = Description of Artificial Sequence: Synthetic oligonucleotide
  misc_feature 1..42: note = Category: MG29-1 sgRNA targeting CD2
  misc_feature 1..42: note = Description: MG29-1-CD2-sgRNA-F2
  source 1..42: mol_type = other RNA
taatttctactgttgtagatttccaacacattttttcctttt

SEQ ID NO: 4766 - RNA, 42 nt, synthetic construct
  misc_feature 1..42: note = Description of Artificial Sequence: Synthetic oligonucleotide
  misc_feature 1..42: note = Category: MG29-1 sgRNA targeting CD2
  misc_feature 1..42: note = Description: MG29-1-CD2-sgRNA-G2
  source 1..42: mol_type = other RNA
taatttctactgttgtagattccaacacattttttccttttg

SEQ ID NO: 4767 - RNA, 42 nt, synthetic construct
  misc_feature 1..42: note = Description of Artificial Sequence: Synthetic oligonucleotide
  misc_feature 1..42: note = Category: MG29-1 sgRNA targeting CD2
  misc_feature 1..42: note = Description: MG29-1-CD2-sgRNA-H2
  source 1..42: mol_type = other RNA
taatttctactgttgtagatccaacacattttttccttttgt

SEQ ID NO: 4768 - RNA, 42 nt, synthetic construct
  misc_feature 1..42: note = Description of Artificial Sequence: Synthetic oligonucleotide
  misc_feature 1..42: note = Category: MG29-1 sgRNA targeting CD2
  misc_feature 1..42: note = Description: MG29-1-CD2-sgRNA-A3
  source 1..42: mol_type = other RNA
taatttctactgttgtagatcaacacattttttccttttgta

SEQ ID NO: 4769 - RNA, 42 nt, synthetic construct
  misc_feature 1..42: note = Description of Artificial Sequence: Synthetic oligonucleotide
  misc_feature 1..42: note = Category: MG29-1 sgRNA targeting CD2
  misc_feature 1..42: note = Description: MG29-1-CD2-sgRNA-B3
  source 1..42: mol_type = other RNA
taatttctactgttgtagatttccttttgtatcatatattga

SEQ ID NO: 4770 - RNA, 42 nt, synthetic construct
  misc_feature 1..42: note = Description of Artificial Sequence: Synthetic oligonucleotide
  misc_feature 1..42: note = Category: MG29-1 sgRNA targeting CD2
  misc_feature 1..42: note = Description: MG29-1-CD2-sgRNA-C3
  source 1..42: mol_type = other RNA
taatttctactgttgtagattccttttgtatcatatattgat

SEQ ID NO: 4771 - RNA, 42 nt, synthetic construct
  misc_feature 1..42: note = Description of Artificial Sequence: Synthetic oligonucleotide
  misc_feature 1..42: note = Category: MG29-1 sgRNA targeting CD2
  misc_feature 1..42: note = Description: MG29-1-CD2-sgRNA-D3
  source 1..42: mol_type = other RNA
taatttctactgttgtagatccttttgtatcatatattgata

SEQ ID NO: 4772 - RNA, 42 nt, synthetic construct
  misc_feature 1..42: note = Description of Artificial Sequence: Synthetic oligonucleotide
  misc_feature 1..42: note = Category: MG29-1 sgRNA targeting CD2
  misc_feature 1..42: note = Description: MG29-1-CD2-sgRNA-E3
  source 1..42: mol_type = other RNA
taatttctactgttgtagatcttttgtatcatatattgatac

SEQ ID NO: 4773 - RNA, 42 nt, synthetic construct
  misc_feature 1..42: note = Description of Artificial Sequence: Synthetic oligonucleotide
  misc_feature 1..42: note = Category: MG29-1 sgRNA targeting CD2
  misc_feature 1..42: note = Description: MG29-1-CD2-sgRNA-F3
  source 1..42: mol_type = other RNA
taatttctactgttgtagatgtatcatatattgataccttgt

SEQ ID NO: 4774 - RNA, 42 nt, synthetic construct
  misc_feature 1..42: note = Description of Artificial Sequence: Synthetic oligonucleotide
  misc_feature 1..42: note = Category: MG29-1 sgRNA targeting CD2
  misc_feature 1..42: note = Description: MG29-1-CD2-sgRNA-G3
  source 1..42: mol_type = other RNA
taatttctactgttgtagattatcatatattgataccttgta

SEQ ID NO: 4775 - RNA, 42 nt, synthetic construct
  misc_feature 1..42: note = Description of Artificial Sequence: Synthetic oligonucleotide
  misc_feature 1..42: note = Category: MG29-1 sgRNA targeting CD2
  misc_feature 1..42: note = Description: MG29-1-CD2-sgRNA-H3
  source 1..42: mol_type = other RNA
taatttctactgttgtagatcagagttccatttttaaatagc

SEQ ID NO: 4776 - RNA, 42 nt, synthetic construct
  misc_feature 1..42: note = Description of Artificial Sequence: Synthetic oligonucleotide
  misc_feature 1..42: note = Category: MG29-1 sgRNA targeting CD2
  misc_feature 1..42: note = Description: MG29-1-CD2-sgRNA-A4
  source 1..42: mol_type = other RNA
taatttctactgttgtagatagagttccatttttaaatagct

SEQ ID NO: 4777 - RNA, 42 nt, synthetic construct
  misc_feature 1..42: note = Description of Artificial Sequence: Synthetic oligonucleotide
  misc_feature 1..42: note = Category: MG29-1 sgRNA targeting CD2
  misc_feature 1..42: note = Description: MG29-1-CD2-sgRNA-B4
  source 1..42: mol_type = other RNA
taatttctactgttgtagattaaatagcttatatgtatcttt

SEQ ID NO: 4778 - RNA, 42 nt, synthetic construct
  misc_feature 1..42: note = Description of Artificial Sequence: Synthetic oligonucleotide
  misc_feature 1..42: note = Category: MG29-1 sgRNA targeting CD2
  misc_feature 1..42: note = Description: MG29-1-CD2-sgRNA-C4
  source 1..42: mol_type = other RNA
taatttctactgttgtagataaatagcttatatgtatctttt

SEQ ID NO: 4779 - RNA, 42 nt, synthetic construct
  misc_feature 1..42: note = Description of Artificial Sequence: Synthetic oligonucleotide
  misc_feature 1..42: note = Category: MG29-1 sgRNA targeting CD2
  misc_feature 1..42: note = Description: MG29-1-CD2-sgRNA-D4
  source 1..42: mol_type = other RNA
taatttctactgttgtagataatagcttatatgtatcttttt

SEQ ID NO: 4780 - RNA, 42 nt, synthetic construct
  misc_feature 1..42: note = Description of Artificial Sequence: Synthetic oligonucleotide
  misc_feature 1..42: note = Category: MG29-1 sgRNA targeting CD2
  misc_feature 1..42: note = Description: MG29-1-CD2-sgRNA-E4
  source 1..42: mol_type = other RNA
taatttctactgttgtagattccttgaaagtctctttctctt

SEQ ID NO: 4781 - RNA, 42 nt, synthetic construct
  misc_feature 1..42: note = Description of Artificial Sequence: Synthetic oligonucleotide
  misc_feature 1..42: note = Category: MG29-1 sgRNA targeting CD2
  misc_feature 1..42: note = Description: MG29-1-CD2-sgRNA-F4
  source 1..42: mol_type = other RNA
taatttctactgttgtagatccttgaaagtctctttctcttt

SEQ ID NO: 4782 - RNA, 42 nt, synthetic construct
  misc_feature 1..42: note = Description of Artificial Sequence: Synthetic oligonucleotide
  misc_feature 1..42: note = Category: MG29-1 sgRNA targeting CD2
  misc_feature 1..42: note = Description: MG29-1-CD2-sgRNA-G4
  source 1..42: mol_type = other RNA
taatttctactgttgtagatcttgaaagtctctttctctttt

SEQ ID NO: 4783 - RNA, 42 nt, synthetic construct
  misc_feature 1..42: note = Description of Artificial Sequence: Synthetic oligonucleotide
  misc_feature 1..42: note = Category: MG29-1 sgRNA targeting CD2
  misc_feature 1..42: note = Description: MG29-1-CD2-sgRNA-H4
  source 1..42: mol_type = other RNA
taatttctactgttgtagattcttttctgaattgtgcaatct

SEQ ID NO: 4784 - RNA, 42 nt, synthetic construct
  misc_feature 1..42: note = Description of Artificial Sequence: Synthetic oligonucleotide
  misc_feature 1..42: note = Category: MG29-1 sgRNA targeting CD2
  misc_feature 1..42: note = Description: MG29-1-CD2-sgRNA-A5
  source 1..42: mol_type = other RNA
taatttctactgttgtagatctgaattgtgcaatctttttct

SEQ ID NO: 4785 - RNA, 42 nt, synthetic construct
  misc_feature 1..42: note = Description of Artificial Sequence: Synthetic oligonucleotide
  misc_feature 1..42: note = Category: MG29-1 sgRNA targeting CD2
  misc_feature 1..42: note = Description: MG29-1-CD2-sgRNA-B5
  source 1..42: mol_type = other RNA
taatttctactgttgtagattgaattgtgcaatctttttctt

SEQ ID NO: 4786 - RNA, 42 nt, synthetic construct
  misc_feature 1..42: note = Description of Artificial Sequence: Synthetic oligonucleotide
  misc_feature 1..42: note = Category: MG29-1 sgRNA targeting CD2
  misc_feature 1..42: note = Description: MG29-1-CD2-sgRNA-C5
  source 1..42: mol_type = other RNA
taatttctactgttgtagattcttgtctgaagttttttccca

SEQ ID NO: 4787 - RNA, 42 nt, synthetic construct
  misc_feature 1..42: note = Description of Artificial Sequence: Synthetic oligonucleotide
  misc_feature 1..42: note = Category: MG29-1 sgRNA targeting CD2
  misc_feature 1..42: note = Description: MG29-1-CD2-sgRNA-D5
  source 1..42: mol_type = other RNA
taatttctactgttgtagatcttgtctgaagttttttcccat

SEQ ID NO: 4788 - RNA, 42 nt, synthetic construct
  misc_feature 1..42: note = Description of Artificial Sequence: Synthetic oligonucleotide
  misc_feature 1..42: note = Category: MG29-1 sgRNA targeting CD2
  misc_feature 1..42: note = Description: MG29-1-CD2-sgRNA-E5
  source 1..42: mol_type = other RNA
taatttctactgttgtagatttgtctgaagttttttcccatt

SEQ ID NO: 4789 - RNA, 42 nt, synthetic construct
  misc_feature 1..42: note = Description of Artificial Sequence: Synthetic oligonucleotide
  misc_feature 1..42: note = Category: MG29-1 sgRNA targeting CD2
  misc_feature 1..42: note = Description: MG29-1-CD2-sgRNA-F5
  source 1..42: mol_type = other RNA
taatttctactgttgtagatttcccattttatatcgtcaata

SEQ ID NO: 4790 - RNA, 42 nt, synthetic construct
  misc_feature 1..42: note = Description of Artificial Sequence: Synthetic oligonucleotide
  misc_feature 1..42: note = Category: MG29-1 sgRNA targeting CD2
  misc_feature 1..42: note = Description: MG29-1-CD2-sgRNA-G5
  source 1..42: mol_type = other RNA
taatttctactgttgtagattcccattttatatcgtcaatat

SEQ ID NO: 4791 - RNA, 42 nt, synthetic construct
  misc_feature 1..42: note = Description of Artificial Sequence: Synthetic oligonucleotide
  misc_feature 1..42: note = Category: MG29-1 sgRNA targeting CD2
  misc_feature 1..42: note = Description: MG29-1-CD2-sgRNA-H5
  source 1..42: mol_type = other RNA
taatttctactgttgtagatcccattttatatcgtcaatatc

SEQ ID NO: 4792 - RNA, 42 nt, synthetic construct
  misc_feature 1..42: note = Description of Artificial Sequence: Synthetic oligonucleotide
  misc_feature 1..42: note = Category: MG29-1 sgRNA targeting CD2
  misc_feature 1..42: note = Description: MG29-1-CD2-sgRNA-A6
  source 1..42: mol_type = other RNA
taatttctactgttgtagatccattttatatcgtcaatatca

SEQ ID NO: 4793 - RNA, 42 nt, synthetic construct
  misc_feature 1..42: note = Description of Artificial Sequence: Synthetic oligonucleotide
  misc_feature 1..42: note = Category: MG29-1 sgRNA targeting CD2
  misc_feature 1..42: note = Description: MG29-1-CD2-sgRNA-B6
  source 1..42: mol_type = other RNA
taatttctactgttgtagatatatcgtcaatatcatcactca

SEQ ID NO: 4794 - RNA, 42 nt, synthetic construct
  misc_feature 1..42: note = Description of Artificial Sequence: Synthetic oligonucleotide
  misc_feature 1..42: note = Category: MG29-1 sgRNA targeting CD2
  misc_feature 1..42: note = Description: MG29-1-CD2-sgRNA-C6
  source 1..42: mol_type = other RNA
taatttctactgttgtagattatcgtcaatatcatcactcat

SEQ ID NO: 4795 - RNA, 42 nt, synthetic construct
  misc_feature 1..42: note = Description of Artificial Sequence: Synthetic oligonucleotide
  misc_feature 1..42: note = Category: MG29-1 sgRNA targeting CD2
  misc_feature 1..42: note = Description: MG29-1-CD2-sgRNA-D6
  source 1..42: mol_type = other RNA
taatttctactgttgtagataaaactaggaatgtccaagttg

SEQ ID NO: 4796 - RNA, 42 nt, synthetic construct
  misc_feature 1..42: note = Description of Artificial Sequence: Synthetic oligonucleotide
  misc_feature 1..42: note = Category: MG29-1 sgRNA targeting CD2
  misc_feature 1..42: note = Description: MG29-1-CD2-sgRNA-E6
  source 1..42: mol_type = other RNA
taatttctactgttgtagatcaaggcattcgtaatctctttg

SEQ ID NO: 4797 - RNA, 42 nt, synthetic construct
  misc_feature 1..42: note = Description of Artificial Sequence: Synthetic oligonucleotide
  misc_feature 1..42: note = Category: MG29-1 sgRNA targeting CD2
  misc_feature 1..42: note = Description: MG29-1-CD2-sgRNA-F6
  source 1..42: mol_type = other RNA
taatttctactgttgtagatctttctttttagagagggtctc

SEQ ID NO: 4798 - RNA, 42 nt, synthetic construct
  misc_feature 1..42: note = Description of Artificial Sequence: Synthetic oligonucleotide
  misc_feature 1..42: note = Category: MG29-1 sgRNA targeting CD2
  misc_feature 1..42: note = Description: MG29-1-CD2-sgRNA-G6
  source 1..42: mol_type = other RNA
taatttctactgttgtagattttttagagagggtctcaaaac

SEQ ID NO: 4799 - RNA, 42 nt, synthetic construct
  misc_feature 1..42: note = Description of Artificial Sequence: Synthetic oligonucleotide
  misc_feature 1..42: note = Category: MG29-1 sgRNA targeting CD2
  misc_feature 1..42: note = Description: MG29-1-CD2-sgRNA-H6
  source 1..42: mol_type = other RNA
taatttctactgttgtagattagagagggtctcaaaaccaaa

SEQ ID NO: 4800 - RNA, 42 nt, synthetic construct
  misc_feature 1..42: note = Description of Artificial Sequence: Synthetic oligonucleotide
  misc_feature 1..42: note = Category: MG29-1 sgRNA targeting CD2
  misc_feature 1..42: note = Description: MG29-1-CD2-sgRNA-A7
  source 1..42: mol_type = other RNA
taatttctactgttgtagatagagagggtctcaaaaccaaag

SEQ ID NO: 4801 - RNA, 42 nt, synthetic construct
  misc_feature 1..42: note = Description of Artificial Sequence: Synthetic oligonucleotide
  misc_feature 1..42: note = Category: MG29-1 sgRNA targeting CD2
  misc_feature 1..42: note = Description: MG29-1-CD2-sgRNA-B7
  source 1..42: mol_type = other RNA
taatttctactgttgtagatgagagggtctcaaaaccaaaga

SEQ ID NO: 4802 - RNA, 42 nt, synthetic construct
  misc_feature 1..42: note = Description of Artificial Sequence: Synthetic oligonucleotide
  misc_feature 1..42: note = Category: MG29-1 sgRNA targeting CD2
  misc_feature 1..42: note = Description: MG29-1-CD2-sgRNA-C7
  source 1..42: mol_type = other RNA
taatttctactgttgtagattcagagggtcatcacacacaag

SEQ ID NO: 4803 - RNA, 42 nt, synthetic construct
  misc_feature 1..42: note = Description of Artificial Sequence: Synthetic oligonucleotide
  misc_feature 1..42: note = Category: MG29-1 sgRNA targeting CD2
  misc_feature 1..42: note = Description: MG29-1-CD2-sgRNA-D7
  source 1..42: mol_type = other RNA
taatttctactgttgtagatttccctgctgtgcacttgaatt

SEQ ID NO: 4804 - RNA, 42 nt, synthetic construct
  misc_feature 1..42: note = Description of Artificial Sequence: Synthetic oligonucleotide
  misc_feature 1..42: note = Category: MG29-1 sgRNA targeting CD2
  misc_feature 1..42: note = Description: MG29-1-CD2-sgRNA-E7
  source 1..42: mol_type = other RNA
taatttctactgttgtagatgcactcaggctggtggtccact

SEQ ID NO: 4805 - RNA, 42 nt, synthetic construct
  misc_feature 1..42: note = Description of Artificial Sequence: Synthetic oligonucleotide
  misc_feature 1..42: note = Category: MG29-1 sgRNA targeting CD2
  misc_feature 1..42: note = Description: MG29-1-CD2-sgRNA-F7
  source 1..42: mol_type = other RNA
taatttctactgttgtagatcactcaggctggtggtccactt

SEQ ID NO: 4806 - RNA, 42 nt, synthetic construct
  misc_feature 1..42: note = Description of Artificial Sequence: Synthetic oligonucleotide
  misc_feature 1..42: note = Category: MG29-1 sgRNA targeting CD2
  misc_feature 1..42: note = Description: MG29-1-CD2-sgRNA-G7
  source 1..42: mol_type = other RNA
taatttctactgttgtagatagatgtttcccatcttgataca

SEQ ID NO: 4807 - RNA, 42 nt, synthetic construct
  misc_feature 1..42: note = Description of Artificial Sequence: Synthetic oligonucleotide
  misc_feature 1..42: note = Category: MG29-1 sgRNA targeting CD2
  misc_feature 1..42: note = Description: MG29-1-CD2-sgRNA-H7
  source 1..42: mol_type = other RNA
taatttctactgttgtagatgatgtttcccatcttgatacag

SEQ ID NO: 4808 - RNA, 42 nt, synthetic construct
  misc_feature 1..42: note = Description of Artificial Sequence: Synthetic oligonucleotide
  misc_feature 1..42: note = Category: MG29-1 sgRNA targeting CD2
  misc_feature 1..42: note = Description: MG29-1-CD2-sgRNA-A8
  source 1..42: mol_type = other RNA
taatttctactgttgtagatccatcttgatacaggtttaatt

SEQ ID NO: 4809 - RNA, 42 nt, synthetic construct
  misc_feature 1..42: note = Description of Artificial Sequence: Synthetic oligonucleotide
  misc_feature 1..42: note = Category: MG29-1 sgRNA targeting CD2
  misc_feature 1..42: note = Description: MG29-1-CD2-sgRNA-B8
  source 1..42: mol_type = other RNA
taatttctactgttgtagatattcggggtcagttccattcat

SEQ ID NO: 4810 - RNA, 42 nt, synthetic construct
  misc_feature 1..42: note = Description of Artificial Sequence: Synthetic oligonucleotide
  misc_feature 1..42: note = Category: MG29-1 sgRNA targeting CD2
  misc_feature 1..42: note = Description: MG29-1-CD2-sgRNA-C8
  source 1..42: mol_type = other RNA
taatttctactgttgtagatgcagagaaaggtctggacatct

SEQ ID NO: 4811 - RNA, 42 nt, synthetic construct
  misc_feature 1..42: note = Description of Artificial Sequence: Synthetic oligonucleotide
  misc_feature 1..42: note = Category: MG29-1 sgRNA targeting CD2
  misc_feature 1..42: note = Description: MG29-1-CD2-sgRNA-D8
  source 1..42: mol_type = other RNA
taatttctactgttgtagatcagagaaaggtctggacatcta

SEQ ID NO: 4812 - RNA, 42 nt, synthetic construct
  misc_feature 1..42: note = Description of Artificial Sequence: Synthetic oligonucleotide
  misc_feature 1..42: note = Category: MG29-1 sgRNA targeting CD2
  misc_feature 1..42: note = Description: MG29-1-CD2-sgRNA-E8
  source 1..42: mol_type = other RNA
taatttctactgttgtagattggcactgctcgttttctatat

SEQ ID NO: 4813 - RNA, 42 nt, synthetic construct
  misc_feature 1..42: note = Description of Artificial Sequence: Synthetic oligonucleotide
  misc_feature 1..42: note = Category: MG29-1 sgRNA targeting CD2
  misc_feature 1..42: note = Description: MG29-1-CD2-sgRNA-F8
  source 1..42: mol_type = other RNA
taatttctactgttgtagatctatatcaccaaaaggaaaaaa

SEQ ID NO: 4814 - RNA, 42 nt, synthetic construct
  misc_feature 1..42: note = Description of Artificial Sequence: Synthetic oligonucleotide
  misc_feature 1..42: note = Category: MG29-1 sgRNA targeting CD2
  misc_feature 1..42: note = Description: MG29-1-CD2-sgRNA-G8
  source 1..42: mol_type = other RNA
taatttctactgttgtagattatatcaccaaaaggaaaaaac

SEQ ID NO: 4815 - RNA, 42 nt, synthetic construct
  misc_feature 1..42: note = Description of Artificial Sequence: Synthetic oligonucleotide
  misc_feature 1..42: note = Category: MG29-1 sgRNA targeting CD2
  misc_feature 1..42: note = Description: MG29-1-CD2-sgRNA-H8
  source 1..42: mol_type = other RNA
taatttctactgttgtagattccgactcctctgttttttcct

SEQ ID NO: 4816 - RNA, 42 nt, synthetic construct
  misc_feature 1..42: note = Description of Artificial Sequence: Synthetic oligonucleotide
  misc_feature 1..42: note = Category: MG29-1 sgRNA targeting CD2
  misc_feature 1..42: note = Description: MG29-1-CD2-sgRNA-A9
  source 1..42: mol_type = other RNA
taatttctactgttgtagatttccttttggtgatatagaaaa

SEQ ID NO: 4817 - RNA, 42 nt, synthetic construct
  misc_feature 1..42: note = Description of Artificial Sequence: Synthetic oligonucleotide
  misc_feature 1..42: note = Category: MG29-1 sgRNA targeting CD2
  misc_feature 1..42: note = Description: MG29-1-CD2-sgRNA-B9
  source 1..42: mol_type = other RNA
taatttctactgttgtagattccttttggtgatatagaaaac

SEQ ID NO: 4818 - RNA, 42 nt, synthetic construct
  misc_feature 1..42: note = Description of Artificial Sequence: Synthetic oligonucleotide
  misc_feature 1..42: note = Category: MG29-1 sgRNA targeting CD2
  misc_feature 1..42: note = Description: MG29-1-CD2-sgRNA-C9
  source 1..42: mol_type = other RNA
taatttctactgttgtagatccttttggtgatatagaaaacg

SEQ ID NO: 4819 - RNA, 42 nt, synthetic construct
  misc_feature 1..42: note = Description of Artificial Sequence: Synthetic oligonucleotide
  misc_feature 1..42: note = Category: MG29-1 sgRNA targeting CD2
  misc_feature 1..42: note = Description: MG29-1-CD2-sgRNA-D9
  source 1..42: mol_type = other RNA
taatttctactgttgtagatcttttggtgatatagaaaacga

SEQ ID NO: 4820 - RNA, 42 nt, synthetic construct
  misc_feature 1..42: note = Description of Artificial Sequence: Synthetic oligonucleotide
  misc_feature 1..42: note = Category: MG29-1 sgRNA targeting CD2
  misc_feature 1..42: note = Description: MG29-1-CD2-sgRNA-E9
  source 1..42: mol_type = other RNA
taatttctactgttgtagatggtgatatagaaaacgagcagt

SEQ ID NO: 4821 - RNA, 42 nt, synthetic construct
  misc_feature 1..42: note = Description of Artificial Sequence: Synthetic oligonucleotide
  misc_feature 1..42: note = Category: MG29-1 sgRNA targeting CD2
  misc_feature 1..42: note = Description: MG29-1-CD2-sgRNA-F9
  source 1..42: mol_type = other RNA
taatttctactgttgtagatgtgatatagaaaacgagcagtg

SEQ ID NO: 4822 - RNA, 42 nt, synthetic construct
  misc_feature 1..42: note = Description of Artificial Sequence: Synthetic oligonucleotide
  misc_feature 1..42: note = Category: MG29-1 sgRNA targeting CD2
  misc_feature 1..42: note = Description: MG29-1-CD2-sgRNA-G9
  source 1..42: mol_type = other RNA
taatttctactgttgtagattctgcaaaaggaagagaagtgg

SEQ ID NO: 4823 - RNA, 42 nt, synthetic construct
  misc_feature 1..42: note = Description of Artificial Sequence: Synthetic oligonucleotide
  misc_feature 1..42: note = Category: MG29-1 sgRNA targeting CD2
  misc_feature 1..42: note = Description: MG29-1-CD2-sgRNA-H9
  source 1..42: mol_type = other RNA
taatttctactgttgtagatgttgttgcagatgaggagctgg

SEQ ID NO: 4824 - RNA, 42 nt, synthetic construct
  misc_feature 1..42: note = Description of Artificial Sequence: Synthetic oligonucleotide
  misc_feature 1..42: note = Category: MG29-1 sgRNA targeting CD2
  misc_feature 1..42: note = Description: MG29-1-CD2-sgRNA-A10
  source 1..42: mol_type = other RNA
taatttctactgttgtagatttgttgcagatgaggagctgga

SEQ ID NO: 4825 - RNA, 42 nt, synthetic construct
  misc_feature 1..42: note = Description of Artificial Sequence: Synthetic oligonucleotide
  misc_feature 1..42: note = Category: MG29-1 sgRNA targeting CD2
  misc_feature 1..42: note = Description: MG29-1-CD2-sgRNA-B10
  source 1..42: mol_type = other RNA
taatttctactgttgtagattatcttttttaattagaggaag

SEQ ID NO: 4826 - RNA, 42 nt, synthetic construct
  misc_feature 1..42: note = Description of Artificial Sequence: Synthetic oligonucleotide
  misc_feature 1..42: note = Category: MG29-1 sgRNA targeting CD2
  misc_feature 1..42: note = Description: MG29-1-CD2-sgRNA-C10
  source 1..42: mol_type = other RNA
taatttctactgttgtagatttaattagaggaaggggacaat

SEQ ID NO: 4827 - RNA, 42 nt, synthetic construct
  misc_feature 1..42: note = Description of Artificial Sequence: Synthetic oligonucleotide
  misc_feature 1..42: note = Category: MG29-1 sgRNA targeting CD2
  misc_feature 1..42: note = Description: MG29-1-CD2-sgRNA-D10
  source 1..42: mol_type = other RNA
taatttctactgttgtagattaattagaggaaggggacaatg

SEQ ID NO: 4828 - RNA, 42 nt, synthetic construct
  misc_feature 1..42: note = Description of Artificial Sequence: Synthetic oligonucleotide
  misc_feature 1..42: note = Category: MG29-1 sgRNA targeting CD2
  misc_feature 1..42: note = Description: MG29-1-CD2-sgRNA-E10
  source 1..42: mol_type = other RNA
taatttctactgttgtagataattagaggaaggggacaatga

SEQ ID NO: 4829 - RNA, 42 nt, synthetic construct
  misc_feature 1..42: note = Description of Artificial Sequence: Synthetic oligonucleotide
  misc_feature 1..42: note = Category: MG29-1 sgRNA targeting CD2
  misc_feature 1..42: note = Description: MG29-1-CD2-sgRNA-F10
  source 1..42: mol_type = other RNA
taatttctactgttgtagatattagaggaaggggacaatgag

SEQ ID NO: 4830 - RNA, 42 nt, synthetic construct
  misc_feature 1..42: note = Description of Artificial Sequence: Synthetic oligonucleotide
  misc_feature 1..42: note = Category: MG29-1 sgRNA targeting CD2
  misc_feature 1..42: note = Description: MG29-1-CD2-sgRNA-G10
  source 1..42: mol_type = other RNA
taatttctactgttgtagatctgctgccccatggggaggttt

SEQ ID NO: 4831 - RNA, 42 nt, synthetic construct
  misc_feature 1..42: note = Description of Artificial Sequence: Synthetic oligonucleotide
  misc_feature 1..42: note = Category: MG29-1 sgRNA targeting CD2
  misc_feature 1..42: note = Description: MG29-1-CD2-sgRNA-H10
  source 1..42: mol_type = other RNA
taatttctactgttgtagattgctgccccatggggaggtttt

SEQ ID NO: 4832 - RNA, 42 nt, synthetic construct
  misc_feature 1..42: note = Description of Artificial Sequence: Synthetic oligonucleotide
  misc_feature 1..42: note = Category: MG29-1 sgRNA targeting CD2
  misc_feature 1..42: note = Description: MG29-1-CD2-sgRNA-A11
  source 1..42: mol_type = other RNA
taatttctactgttgtagatggctgaactcgaggtctgggga

SEQ ID NO: 4833 - RNA, 42 nt, synthetic construct
  misc_feature 1..42: note = Description of Artificial Sequence: Synthetic oligonucleotide
  misc_feature 1..42: note = Category: MG29-1 sgRNA targeting CD2
  misc_feature 1..42: note = Description: MG29-1-CD2-sgRNA-B11
  source 1..42: mol_type = other RNA
taatttctactgttgtagatgctgaactcgaggtctggggag

SEQ ID NO: 4834 - RNA, 42 nt, synthetic construct
  misc_feature 1..42: note = Description of Artificial Sequence: Synthetic oligonucleotide
  misc_feature 1..42: note = Category: MG29-1 sgRNA targeting CD2
  misc_feature 1..42: note = Description: MG29-1-CD2-sgRNA-C11
  source 1..42: mol_type = other RNA
taatttctactgttgtagattgctggtgaacttgtgtgcccg

SEQ ID NO: 4835 - RNA, 42 nt, synthetic construct
  misc_feature 1..42: note = Description of Artificial Sequence: Synthetic oligonucleotide
  misc_feature 1..42: note = Category: MG29-1 sgRNA targeting CD2
  misc_feature 1..42: note = Description: MG29-1-CD2-sgRNA-D11
  source 1..42: mol_type = other RNA
taatttctactgttgtagatgtggggcttccggcccctttct

SEQ ID NO: 4836 - RNA, 42 nt, synthetic construct
  misc_feature 1..42: note = Description of Artificial Sequence: Synthetic oligonucleotide
  misc_feature 1..42: note = Category: MG29-1 sgRNA targeting CD2
  misc_feature 1..42: note = Description: MG29-1-CD2-sgRNA-E11
  source 1..42: mol_type = other RNA
taatttctactgttgtagatttcagtagctactctgtgggct

SEQ ID NO: 4837 - DNA, 22 bp, unidentified
  misc_feature 1..22: note = Description of Unknown: MG29-1-CD2-target site-A1 sequence
  misc_feature 1..22: note = Category: DNA sequence of CD2 target site
  source 1..22: mol_type = unassigned DNA
catgtaaatttgtagccagctt

SEQ ID NO: 4838 - DNA, 22 bp, unidentified
  misc_feature 1..22: note = Description of Unknown: MG29-1-CD2-target site-B1 sequence
  misc_feature 1..22: note = Category: DNA sequence of CD2 target site
  source 1..22: mol_type = unassigned DNA
tagccagcttccttctgatttt

SEQ ID NO: 4839 - DNA, 22 bp, unidentified
  misc_feature 1..22: note = Description of Unknown: MG29-1-CD2-target site-C1 sequence
  misc_feature 1..22: note = Category: DNA sequence of CD2 target site
  source 1..22: mol_type = unassigned DNA
actcttatgcttacctttggaa

SEQ ID NO: 4840 - DNA, 22 bp, unidentified
  misc_feature 1..22: note = Description of Unknown: MG29-1-CD2-target site-D1 sequence
  misc_feature 1..22: note = Category: DNA sequence of CD2 target site
  source 1..22: mol_type = unassigned DNA
gaagaaacattgaaaatcagaa

SEQ ID NO: 4841 - DNA, 22 bp, unidentified
  misc_feature 1..22: note = Description of Unknown: MG29-1-CD2-target site-E1 sequence
  misc_feature 1..22: note = Category: DNA sequence of CD2 target site
  source 1..22: mol_type = unassigned DNA
gctttttataggtgcagtctcc

SEQ ID NO: 4842 - DNA, 22 bp, unidentified
  misc_feature 1..22: note = Description of Unknown: MG29-1-CD2-target site-F1 sequence
  misc_feature 1..22: note = Category: DNA sequence of CD2 target site
  source 1..22: mol_type = unassigned DNA
ctttttataggtgcagtctcca

SEQ ID NO: 4843 - DNA, 22 bp, unidentified
  misc_feature 1..22: note = Description of Unknown: MG29-1-CD2-target site-G1 sequence
  misc_feature 1..22: note = Category: DNA sequence of CD2 target site
  source 1..22: mol_type = unassigned DNA
tataggtgcagtctccaaagag

SEQ ID NO: 4844 - DNA, 22 bp, unidentified
  misc_feature 1..22: note = Description of Unknown: MG29-1-CD2-target site-H1 sequence
  misc_feature 1..22: note = Category: DNA sequence of CD2 target site
  source 1..22: mol_type = unassigned DNA
ataggtgcagtctccaaagaga

SEQ ID NO: 4845 - DNA, 22 bp, unidentified
  misc_feature 1..22: note = Description of Unknown: MG29-1-CD2-target site-A2 sequence
  misc_feature 1..22: note = Category: DNA sequence of CD2 target site
  source 1..22: mol_type = unassigned DNA
taggtgcagtctccaaagagat

SEQ ID NO: 4846 - DNA, 22 bp, unidentified
  misc_feature 1..22: note = Description of Unknown: MG29-1-CD2-target site-B2 sequence
  misc_feature 1..22: note = Category: DNA sequence of CD2 target site
  source 1..22: mol_type = unassigned DNA
caaatgagtgatgatattgacg

SEQ ID NO: 4847 - DNA, 22 bp, unidentified
  misc_feature 1..22: note = Description of Unknown: MG29-1-CD2-target site-C2 sequence
  misc_feature 1..22: note = Category: DNA sequence of CD2 target site
  source 1..22: mol_type = unassigned DNA
aaatgagtgatgatattgacga

SEQ ID NO: 4848 - DNA, 22 bp, unidentified
  misc_feature 1..22: note = Description of Unknown: MG29-1-CD2-target site-D2 sequence
  misc_feature 1..22: note = Category: DNA sequence of CD2 target site
  source 1..22: mol_type = unassigned DNA
aaggaaaaagatacatataagc

SEQ ID NO: 4849 - DNA, 22 bp, unidentified
  misc_feature 1..22: note = Description of Unknown: MG29-1-CD2-target site-E2 sequence
  misc_feature 1..22: note = Category: DNA sequence of CD2 target site
  source 1..22: mol_type = unassigned DNA
aaaatggaactctgaaaattaa

SEQ ID NO: 4850 - DNA, 22 bp, unidentified
  misc_feature 1..22: note = Description of Unknown: MG29-1-CD2-target site-F2 sequence
  misc_feature 1..22: note = Category: DNA sequence of CD2 target site
  source 1..22: mol_type = unassigned DNA
ttccaacacattttttcctttt

SEQ ID NO: 4851 - DNA, 22 bp, unidentified
  misc_feature 1..22: note = Description of Unknown: MG29-1-CD2-target site-G2 sequence
  misc_feature 1..22: note = Category: DNA sequence of CD2 target site
  source 1..22: mol_type = unassigned DNA
tccaacacattttttccttttg

SEQ ID NO: 4852 - DNA, 22 bp, unidentified
  misc_feature 1..22: note = Description of Unknown: MG29-1-CD2-target site-H2 sequence
  misc_feature 1..22: note = Category: DNA sequence of CD2 target site
  source 1..22: mol_type = unassigned DNA
ccaacacattttttccttttgt

SEQ ID NO: 4853 - DNA, 22 bp, unidentified
  misc_feature 1..22: note = Description of Unknown: MG29-1-CD2-target site-A3 sequence
  misc_feature 1..22: note = Category: DNA sequence of CD2 target site
  source 1..22: mol_type = unassigned DNA
caacacattttttccttttgta

SEQ ID NO: 4854 - DNA, 22 bp, unidentified
  misc_feature 1..22: note = Description of Unknown: MG29-1-CD2-target site-B3 sequence
  misc_feature 1..22: note = Category: DNA sequence of CD2 target site
  source 1..22: mol_type = unassigned DNA
ttccttttgtatcatatattga

SEQ ID NO: 4855 - DNA, 22 bp, unidentified
  misc_feature 1..22: note = Description of Unknown: MG29-1-CD2-target site-C3 sequence
  misc_feature 1..22: note = Category: DNA sequence of CD2 target site
  source 1..22: mol_type = unassigned DNA
tccttttgtatcatatattgat

SEQ ID NO: 4856 - DNA, 22 bp, unidentified
  misc_feature 1..22: note = Description of Unknown: MG29-1-CD2-target site-D3 sequence
  misc_feature 1..22: note = Category: DNA sequence of CD2 target site
  source 1..22: mol_type = unassigned DNA
ccttttgtatcatatattgata

SEQ ID NO: 4857 - DNA, 22 bp, unidentified
  misc_feature 1..22: note = Description of Unknown: MG29-1-CD2-target site-E3 sequence
  misc_feature 1..22: note = Category: DNA sequence of CD2 target site
  source 1..22: mol_type = unassigned DNA
cttttgtatcatatattgatac

SEQ ID NO: 4858 - DNA, 22 bp, unidentified
  misc_feature 1..22: note = Description of Unknown: MG29-1-CD2-target site-F3 sequence
  misc_feature 1..22: note = Category: DNA sequence of CD2 target site
  source 1..22: mol_type = unassigned DNA
gtatcatatattgataccttgt

SEQ ID NO: 4859 - DNA, 22 bp, unidentified
  misc_feature 1..22: note = Description of Unknown: MG29-1-CD2-target site-G3 sequence
  misc_feature 1..22: note = Category: DNA sequence of CD2 target site
  source 1..22: mol_type = unassigned DNA
tatcatatattgataccttgta

SEQ ID NO: 4860 - DNA, 22 bp, unidentified
  misc_feature 1..22: note = Description of Unknown: MG29-1-CD2-target site-H3 sequence
  misc_feature 1..22: note = Category: DNA sequence of CD2 target site
  source 1..22: mol_type = unassigned DNA
cagagttccatttttaaatagc

SEQ ID NO: 4861 - DNA, 22 bp, unidentified
  misc_feature 1..22: note = Description of Unknown: MG29-1-CD2-target site-A4 sequence
  misc_feature 1..22: note = Category: DNA sequence of CD2 target site
  source 1..22: mol_type = unassigned DNA
agagttccatttttaaatagct

SEQ ID NO: 4862 - DNA, 22 bp, unidentified
  misc_feature 1..22: note = Description of Unknown: MG29-1-CD2-target site-B4 sequence
  misc_feature 1..22: note = Category: DNA sequence of CD2 target site
  source 1..22: mol_type = unassigned DNA
taaatagcttatatgtatcttt

SEQ ID NO: 4863 - DNA, 22 bp, unidentified
  misc_feature 1..22: note = Description of Unknown: MG29-1-CD2-target site-C4 sequence
  misc_feature 1..22: note = Category: DNA sequence of CD2 target site
  source 1..22: mol_type = unassigned DNA
aaatagcttatatgtatctttt

SEQ ID NO: 4864 - DNA, 22 bp, unidentified
  misc_feature 1..22: note = Description of Unknown: MG29-1-CD2-target site-D4 sequence
  misc_feature 1..22: note = Category: DNA sequence of CD2 target site
  source 1..22: mol_type = unassigned DNA
aatagcttatatgtatcttttt

SEQ ID NO: 4865 - DNA, 22 bp, unidentified
  misc_feature 1..22: note = Description of Unknown: MG29-1-CD2-target site-E4 sequence
  misc_feature 1..22: note = Category: DNA sequence of CD2 target site
  source 1..22: mol_type = unassigned DNA
tccttgaaagtctctttctctt

SEQ ID NO: 4866 - DNA, 22 bp, unidentified
  misc_feature 1..22: note = Description of Unknown: MG29-1-CD2-target site-F4 sequence
  misc_feature 1..22: note = Category: DNA sequence of CD2 target site
  source 1..22: mol_type = unassigned DNA
ccttgaaagtctctttctcttt

SEQ ID NO: 4867 - DNA, 22 bp, unidentified
  misc_feature 1..22: note = Description of Unknown: MG29-1-CD2-target site-G4 sequence
  misc_feature 1..22: note = Category: DNA sequence of CD2 target site
  source 1..22: mol_type = unassigned DNA
cttgaaagtctctttctctttt

SEQ ID NO: 4868 - DNA, 22 bp, unidentified
  misc_feature 1..22: note = Description of Unknown: MG29-1-CD2-target site-H4 sequence
  misc_feature 1..22: note = Category: DNA sequence of CD2 target site
  source 1..22: mol_type = unassigned DNA
tcttttctgaattgtgcaatct

SEQ ID NO: 4869 - DNA, 22 bp, unidentified
  misc_feature 1..22: note = Description of Unknown: MG29-1-CD2-target site-A5 sequence
  misc_feature 1..22: note = Category: DNA sequence of CD2 target site
  source 1..22: mol_type = unassigned DNA
ctgaattgtgcaatctttttct

SEQ ID NO: 4870 - DNA, 22 bp, unidentified
  misc_feature 1..22: note = Description of Unknown: MG29-1-CD2-target site-B5 sequence
  misc_feature 1..22: note = Category: DNA sequence of CD2 target site
  source 1..22: mol_type = unassigned DNA
tgaattgtgcaatctttttctt

SEQ ID NO: 4871 - DNA, 22 bp, unidentified
  misc_feature 1..22: note = Description of Unknown: MG29-1-CD2-target site-C5 sequence
  misc_feature 1..22: note = Category: DNA sequence of CD2 target site
  source 1..22: mol_type = unassigned DNA
tcttgtctgaagttttttccca

SEQ ID NO: 4872 - DNA, 22 bp, unidentified
  misc_feature 1..22: note = Description of Unknown: MG29-1-CD2-target site-D5 sequence
  misc_feature 1..22: note = Category: DNA sequence of CD2 target site
  source 1..22: mol_type = unassigned DNA
cttgtctgaagttttttcccat

SEQ ID NO: 4873 - DNA, 22 bp, unidentified
  misc_feature 1..22: note = Description of Unknown: MG29-1-CD2-target site-E5 sequence
  misc_feature 1..22: note = Category: DNA sequence of CD2 target site
  source 1..22: mol_type = unassigned DNA
ttgtctgaagttttttcccatt

SEQ ID NO: 4874 - DNA, 22 bp, unidentified
  misc_feature 1..22: note = Description of Unknown: MG29-1-CD2-target site-F5 sequence
  misc_feature 1..22: note = Category: DNA sequence of CD2 target site
  source 1..22: mol_type = unassigned DNA
ttcccattttatatcgtcaata

SEQ ID NO: 4875 - DNA, 22 bp, unidentified
  misc_feature 1..22: note = Description of Unknown: MG29-1-CD2-target site-G5 sequence
  misc_feature 1..22: note = Category: DNA sequence of CD2 target site
  source 1..22: mol_type = unassigned DNA
tcccattttatatcgtcaatat

SEQ ID NO: 4876 - DNA, 22 bp, unidentified
  misc_feature 1..22: note = Description of Unknown: MG29-1-CD2-target site-H5 sequence
  misc_feature 1..22: note = Category: DNA sequence of CD2 target site
  source 1..22: mol_type = unassigned DNA
cccattttatatcgtcaatatc

SEQ ID NO: 4877 - DNA, 22 bp, unidentified
  misc_feature 1..22: note = Description of Unknown: MG29-1-CD2-target site-A6 sequence
  misc_feature 1..22: note = Category: DNA sequence of CD2 target site
  source 1..22: mol_type = unassigned DNA
ccattttatatcgtcaatatca

SEQ ID NO: 4878 - DNA, 22 bp, unidentified
  misc_feature 1..22: note = Description of Unknown: MG29-1-CD2-target site-B6 sequence
  misc_feature 1..22: note = Category: DNA sequence of CD2 target site
  source 1..22: mol_type = unassigned DNA
atatcgtcaatatcatcactca

SEQ ID NO: 4879 - DNA, 22 bp, unidentified
  misc_feature 1..22: note = Description of Unknown: MG29-1-CD2-target site-C6 sequence
  misc_feature 1..22: note = Category: DNA sequence of CD2 target site
  source 1..22: mol_type = unassigned DNA
tatcgtcaatatcatcactcat

SEQ ID NO: 4880 - DNA, 22 bp, unidentified
  misc_feature 1..22: note = Description of Unknown: MG29-1-CD2-target site-D6 sequence
  misc_feature 1..22: note = Category: DNA sequence of CD2 target site
  source 1..22: mol_type = unassigned DNA
aaaactaggaatgtccaagttg

SEQ ID NO: 4881 - DNA, 22 bp, unidentified
  misc_feature 1..22: note = Description of Unknown: MG29-1-CD2-target site-E6 sequence
  misc_feature 1..22: note = Category: DNA sequence of CD2 target site
  source 1..22: mol_type = unassigned DNA
caaggcattcgtaatctctttg

SEQ ID NO: 4882 - DNA, 22 bp, unidentified
  misc_feature 1..22: note = Description of Unknown: MG29-1-CD2-target site-F6 sequence
  misc_feature 1..22: note = Category: DNA sequence of CD2 target site
  source 1..22: mol_type = unassigned DNA
ctttctttttagagagggtctc

SEQ ID NO: 4883 - DNA, 22 bp, unidentified
  misc_feature 1..22: note = Description of Unknown: MG29-1-CD2-target site-G6 sequence
  misc_feature 1..22: note = Category: DNA sequence of CD2 target site
  source 1..22: mol_type = unassigned DNA
tttttagagagggtctcaaaac

SEQ ID NO: 4884 - DNA, 22 bp, unidentified
  misc_feature 1..22: note = Description of Unknown: MG29-1-CD2-target site-H6 sequence
  misc_feature 1..22: note = Category: DNA sequence of CD2 target site
  source 1..22: mol_type = unassigned DNA
tagagagggtctcaaaaccaaa

SEQ ID NO: 4885 - DNA, 22 bp, unidentified
  misc_feature 1..22: note = Description of Unknown: MG29-1-CD2-target site-A7 sequence
  misc_feature 1..22: note = Category: DNA sequence of CD2 target site
  source 1..22: mol_type = unassigned DNA
agagagggtctcaaaaccaaag

SEQ ID NO: 4886 - DNA, 22 bp, unidentified
  misc_feature 1..22: note = Description of Unknown: MG29-1-CD2-target site-B7 sequence
  misc_feature 1..22: note = Category: DNA sequence of CD2 target site
  source 1..22: mol_type = unassigned DNA
gagagggtctcaaaaccaaaga

SEQ ID NO: 4887 - DNA, 22 bp, unidentified
  misc_feature 1..22: note = Description of Unknown: MG29-1-CD2-target site-C7 sequence
  misc_feature 1..22: note = Category: DNA sequence of CD2 target site
  source 1..22: mol_type = unassigned DNA
tcagagggtcatcacacacaag

SEQ ID NO: 4888 - DNA, 22 bp, unidentified
  misc_feature 1..22: note = Description of Unknown: MG29-1-CD2-target site-D7 sequence
  misc_feature 1..22: note = Category: DNA sequence of CD2 target site
  source 1..22: mol_type = unassigned DNA
ttccctgctgtgcacttgaatt

SEQ ID NO: 4889 - DNA, 22 bp, unidentified
  misc_feature 1..22: note = Description of Unknown: MG29-1-CD2-target site-E7 sequence
  misc_feature 1..22: note = Category: DNA sequence of CD2 target site
  source 1..22: mol_type = unassigned DNA
gcactcaggctggtggtccact

SEQ ID NO: 4890 - DNA, 22 bp, unidentified
  misc_feature 1..22: note = Description of Unknown: MG29-1-CD2-target site-F7 sequence
  misc_feature 1..22: note = Category: DNA sequence of CD2 target site
  source 1..22: mol_type = unassigned DNA
cactcaggctggtggtccactt

SEQ ID NO: 4891 - DNA, 22 bp, unidentified
  misc_feature 1..22: note = Description of Unknown: MG29-1-CD2-target site-G7 sequence
  misc_feature 1..22: note = Category: DNA sequence of CD2 target site
  source 1..22: mol_type = unassigned DNA
agatgtttcccatcttgataca

SEQ ID NO: 4892 - DNA, 22 bp, unidentified
  misc_feature 1..22: note = Description of Unknown: MG29-1-CD2-target site-H7 sequence
  misc_feature 1..22: note = Category: DNA sequence of CD2 target site
  source 1..22: mol_type = unassigned DNA
gatgtttcccatcttgatacag

SEQ ID NO: 4893 - DNA, 22 bp, unidentified
  misc_feature 1..22: note = Description of Unknown: MG29-1-CD2-target site-A8 sequence
  misc_feature 1..22: note = Category: DNA sequence of CD2 target site
  source 1..22: mol_type = unassigned DNA
ccatcttgatacaggtttaatt

SEQ ID NO: 4894 - DNA, 22 bp, unidentified
  misc_feature 1..22: note = Description of Unknown: MG29-1-CD2-target site-B8 sequence
  misc_feature 1..22: note = Category: DNA sequence of CD2 target site
  source 1..22: mol_type = unassigned DNA
attcggggtcagttccattcat

SEQ ID NO: 4895 - DNA, 22 bp, unidentified
  misc_feature 1..22: note = Description of Unknown: MG29-1-CD2-target site-C8 sequence
  misc_feature 1..22: note = Category: DNA sequence of CD2 target site
  source 1..22: mol_type = unassigned DNA
ccatcttgatacaggtttaatt

SEQ ID NO: 4896 - DNA, 22 bp, unidentified
  misc_feature 1..22: note = Description of Unknown: MG29-1-CD2-target site-D8 sequence
  misc_feature 1..22: note = Category: DNA sequence of CD2 target site
  source 1..22: mol_type = unassigned DNA
cagagaaaggtctggacatcta

SEQ ID NO: 4897 - DNA, 22 bp, unidentified
  misc_feature 1..22: note = Description of Unknown: MG29-1-CD2-target site-E8 sequence
  misc_feature 1..22: note = Category: DNA sequence of CD2 target site
  source 1..22: mol_type = unassigned DNA
tggcactgctcgttttctatat

SEQ ID NO: 4898 - DNA, 22 bp, unidentified
  misc_feature 1..22: note = Description of Unknown: MG29-1-CD2-target site-F8 sequence
  misc_feature 1..22: note = Category: DNA sequence of CD2 target site
  source 1..22: mol_type = unassigned DNA
ctatatcaccaaaaggaaaaaa

SEQ ID NO: 4899 - DNA, 22 bp, unidentified
  misc_feature 1..22: note = Description of Unknown: MG29-1-CD2-target site-G8 sequence
  misc_feature 1..22: note = Category: DNA sequence of CD2 target site
  source 1..22: mol_type = unassigned DNA
tatatcaccaaaaggaaaaaac

SEQ ID NO: 4900 - DNA, 22 bp, unidentified
  misc_feature 1..22: note = Description of Unknown: MG29-1-CD2-target site-H8 sequence
  misc_feature 1..22: note = Category: DNA sequence of CD2 target site
  source 1..22: mol_type = unassigned DNA
tccgactcctctgttttttcct

SEQ ID NO: 4901 - DNA, 22 bp, unidentified
  misc_feature 1..22: note = Description of Unknown: MG29-1-CD2-target site-A9 sequence
  misc_feature 1..22: note = Category: DNA sequence of CD2 target site
  source 1..22: mol_type = unassigned DNA
ttccttttggtgatatagaaaa

SEQ ID NO: 4902 - DNA, 22 bp, unidentified
  misc_feature 1..22: note = Description of Unknown: MG29-1-CD2-target site-B9 sequence
  misc_feature 1..22: note = Category: DNA sequence of CD2 target site
  source 1..22: mol_type = unassigned DNA
tccttttggtgatatagaaaac

SEQ ID NO: 4903 - DNA, 22 bp, unidentified
  misc_feature 1..22: note = Description of Unknown: MG29-1-CD2-target site-C9 sequence
  misc_feature 1..22: note = Category: DNA sequence of CD2 target site
  source 1..22: mol_type = unassigned DNA
ccttttggtgatatagaaaacg

SEQ ID NO: 4904 - DNA, 22 bp, unidentified
  misc_feature 1..22: note = Description of Unknown: MG29-1-CD2-target site-D9 sequence
  misc_feature 1..22: note = Category: DNA sequence of CD2 target site
  source 1..22: mol_type = unassigned DNA
cttttggtgatatagaaaacga

SEQ ID NO: 4905 - DNA, 22 bp, unidentified
  misc_feature 1..22: note = Description of Unknown: MG29-1-CD2-target site-E9 sequence
  misc_feature 1..22: note = Category: DNA sequence of CD2 target site
  source 1..22: mol_type = unassigned DNA
ggtgatatagaaaacgagcagt

SEQ ID NO: 4906 - DNA, 22 bp, unidentified
  misc_feature 1..22: note = Description of Unknown: MG29-1-CD2-target site-F9 sequence
  misc_feature 1..22: note = Category: DNA sequence of CD2 target site
  source 1..22: mol_type = unassigned DNA
gtgatatagaaaacgagcagtg

SEQ ID NO: 4907 - DNA, 22 bp, unidentified
  misc_feature 1..22: note = Description of Unknown: MG29-1-CD2-target site-G9 sequence
  misc_feature 1..22: note = Category: DNA sequence of CD2 target site
  source 1..22: mol_type = unassigned DNA
tctgcaaaaggaagagaagtgg

SEQ ID NO: 4908 - DNA, 22 bp, unidentified
  misc_feature 1..22: note = Description of Unknown: MG29-1-CD2-target site-H9 sequence
  misc_feature 1..22: note = Category: DNA sequence of CD2 target site
  source 1..22: mol_type = unassigned DNA
gttgttgcagatgaggagctgg

SEQ ID NO: 4909 - DNA, 22 bp, unidentified
  misc_feature 1..22: note = Description of Unknown: MG29-1-CD2-target site-A10 sequence
  misc_feature 1..22: note = Category: DNA sequence of CD2 target site
  source 1..22: mol_type = unassigned DNA
ttgttgcagatgaggagctgga

SEQ ID NO: 4910 - DNA, 22 bp, unidentified
  misc_feature 1..22: note = Description of Unknown: MG29-1-CD2-target site-B10 sequence
  misc_feature 1..22: note = Category: DNA sequence of CD2 target site
  source 1..22: mol_type = unassigned DNA
tatcttttttaattagaggaag

SEQ ID NO: 4911 - DNA, 22 bp, unidentified
  misc_feature 1..22: note = Description of Unknown: MG29-1-CD2-target site-C10 sequence
  misc_feature 1..22: note = Category: DNA sequence of CD2 target site
  source 1..22: mol_type = unassigned DNA
ttaattagaggaaggggacaat

SEQ ID NO: 4912 - DNA, 22 bp, unidentified
  misc_feature 1..22: note = Description of Unknown: MG29-1-CD2-target site-D10 sequence
  misc_feature 1..22: note = Category: DNA sequence of CD2 target site
  source 1..22: mol_type = unassigned DNA
taattagaggaaggggacaatg

SEQ ID NO: 4913 - DNA, 22 bp, unidentified
  misc_feature 1..22: note = Description of Unknown: MG29-1-CD2-target site-E10 sequence
  misc_feature 1..22: note = Category: DNA sequence of CD2 target site
  source 1..22: mol_type = unassigned DNA
aattagaggaaggggacaatga

SEQ ID NO: 4914 - DNA, 22 bp, unidentified
  misc_feature 1..22: note = Description of Unknown: MG29-1-CD2-target site-F10 sequence
  misc_feature 1..22: note = Category: DNA sequence of CD2 target site
  source 1..22: mol_type = unassigned DNA
attagaggaaggggacaatgag

SEQ ID NO: 4915 - DNA, 22 bp, unidentified
  misc_feature 1..22: note = Description of Unknown: MG29-1-CD2-target site-G10 sequence
  misc_feature 1..22: note = Category: DNA sequence of CD2 target site
  source 1..22: mol_type = unassigned DNA
ctgctgccccatggggaggttt

SEQ ID NO: 4916 - DNA, 22 bp, unidentified
  misc_feature 1..22: note = Description of Unknown: MG29-1-CD2-target site-H10 sequence
  misc_feature 1..22: note = Category: DNA sequence of CD2 target site
  source 1..22: mol_type = unassigned DNA
tgctgccccatggggaggtttt

SEQ ID NO: 4917 - DNA, 22 bp, unidentified
  misc_feature 1..22: note = Description of Unknown: MG29-1-CD2-target site-A11 sequence
  misc_feature 1..22: note = Category: DNA sequence of CD2 target site
  source 1..22: mol_type = unassigned DNA
ggctgaactcgaggtctgggga

SEQ ID NO: 4918 - DNA, 22 bp, unidentified
  misc_feature 1..22: note = Description of Unknown: MG29-1-CD2-target site-B11 sequence
  misc_feature 1..22: note = Category: DNA sequence of CD2 target site
  source 1..22: mol_type = unassigned DNA
gctgaactcgaggtctggggag

SEQ ID NO: 4919 - DNA, 22 bp, unidentified
  misc_feature 1..22: note = Description of Unknown: MG29-1-CD2-target site-C11 sequence
  misc_feature 1..22: note = Category: DNA sequence of CD2 target site
  source 1..22: mol_type = unassigned DNA
tgctggtgaacttgtgtgcccg

SEQ ID NO: 4920 - DNA, 22 bp, unidentified
  misc_feature 1..22: note = Description of Unknown: MG29-1-CD2-target site-D11 sequence
  misc_feature 1..22: note = Category: DNA sequence of CD2 target site
  source 1..22: mol_type = unassigned DNA
gtggggcttccggcccctttct

SEQ ID NO: 4921 - DNA, 22 bp, unidentified
  misc_feature 1..22: note = Description of Unknown: MG29-1-CD2-target site-E11 sequence
  misc_feature 1..22: note = Category: DNA sequence of CD2 target site
  source 1..22: mol_type = unassigned DNA
ttcagtagctactctgtgggct

SEQ ID NO: 4922 - RNA, 42 nt, synthetic construct
  misc_feature 1..42: note = Description of Artificial Sequence: Synthetic oligonucleotide
  misc_feature 1..42: note = Category: MG29-1 sgRNA targeting CD5
  misc_feature 1..42: note = Description: MG29-1-CD5-sgRNA-A1
  source 1..42: mol_type = other RNA
taatttctactgttgtagattgcagtcgcttcctgcctcgga

SEQ ID NO: 4923 - RNA, 42 nt, synthetic construct
  misc_feature 1..42: note = Description of Artificial Sequence: Synthetic oligonucleotide
  misc_feature 1..42: note = Category: MG29-1 sgRNA targeting CD5
  misc_feature 1..42: note = Description: MG29-1-CD5-sgRNA-B1
  source 1..42: mol_type = other RNA
taatttctactgttgtagattccatgtggctcttccttacct

SEQ ID NO: 4924 - RNA, 42 nt, synthetic construct
  misc_feature 1..42: note = Description of Artificial Sequence: Synthetic oligonucleotide
  misc_feature 1..42: note = Category: MG29-1 sgRNA targeting CD5
  misc_feature 1..42: note = Description: MG29-1-CD5-sgRNA-C1
  source 1..42: mol_type = other RNA
taatttctactgttgtagattgacccccagatttccaggcaa

SEQ ID NO: 4925 - RNA, 42 nt, synthetic construct
  misc_feature 1..42: note = Description of Artificial Sequence: Synthetic oligonucleotide
  misc_feature 1..42: note = Category: MG29-1 sgRNA targeting CD5
  misc_feature 1..42: note = Description: MG29-1-CD5-sgRNA-D1
  source 1..42: mol_type = other RNA
taatttctactgttgtagatcaggcaaggctcacccgttcca

SEQ ID NO: 4926 - RNA, 42 nt, synthetic construct
  misc_feature 1..42: note = Description of Artificial Sequence: Synthetic oligonucleotide
  misc_feature 1..42: note = Category: MG29-1 sgRNA targeting CD5
  misc_feature 1..42: note = Description: MG29-1-CD5-sgRNA-E1
  source 1..42: mol_type = other RNA
taatttctactgttgtagatcagccagagctggggccggagc

SEQ ID NO: 4927 - RNA, 42 nt, synthetic construct
  misc_feature 1..42: note = Description of Artificial Sequence: Synthetic oligonucleotide
  misc_feature 1..42: note = Category: MG29-1 sgRNA targeting CD5
  misc_feature 1..42: note = Description: MG29-1-CD5-sgRNA-F1
  source 1..42: mol_type = other RNA
taatttctactgttgtagattgctgtggctgcagttggagaa

SEQ ID NO: 4928 - RNA, 42 nt, synthetic construct
  misc_feature 1..42: note = Description of Artificial Sequence: Synthetic oligonucleotide
  misc_feature 1..42: note = Category: MG29-1 sgRNA targeting CD5
  misc_feature 1..42: note = Description: MG29-1-CD5-sgRNA-G1
  source 1..42: mol_type = other RNA
taatttctactgttgtagatgacgcttgactggggtcctccc

SEQ ID NO: 4929 - RNA, 42 nt, synthetic construct
  misc_feature 1..42: note = Description of Artificial Sequence: Synthetic oligonucleotide
  misc_feature 1..42: note = Category: MG29-1 sgRNA targeting CD5
  misc_feature 1..42: note = Description: MG29-1-CD5-sgRNA-H1
  source 1..42: mol_type = other RNA
taatttctactgttgtagatacgcttgactggggtcctccca

SEQ ID NO: 4930 - RNA, 42 nt, synthetic construct
  misc_feature 1..42: note = Description of Artificial Sequence: Synthetic oligonucleotide
  misc_feature 1..42: note = Category: MG29-1 sgRNA targeting CD5
  misc_feature 1..42: note = Description: MG29-1-CD5-sgRNA-A2
  source 1..42: mol_type = other RNA
taatttctactgttgtagatctggggcttgattttcctgaag

SEQ ID NO: 4931 - RNA, 42 nt, synthetic construct
  misc_feature 1..42: note = Description of Artificial Sequence: Synthetic oligonucleotide
  misc_feature 1..42: note = Category: MG29-1 sgRNA targeting CD5
  misc_feature 1..42: note = Description: MG29-1-CD5-sgRNA-B2
  source 1..42: mol_type = other RNA
taatttctactgttgtagattggggcttgattttcctgaagc

SEQ ID NO: 4932 - RNA, 42 nt, synthetic construct
  misc_feature 1..42: note = Description of Artificial Sequence: Synthetic oligonucleotide
  misc_feature 1..42: note = Category: MG29-1 sgRNA targeting CD5
  misc_feature 1..42: note = Description: MG29-1-CD5-sgRNA-C2
  source 1..42: mol_type = other RNA
taatttctactgttgtagatcctgaagcaatgctccagggag

SEQ ID NO: 4933 - RNA, 42 nt, synthetic construct
  misc_feature 1..42: note = Description of Artificial Sequence: Synthetic oligonucleotide
  misc_feature 1..42: note = Category: MG29-1 sgRNA targeting CD5
  misc_feature 1..42: note = Description: MG29-1-CD5-sgRNA-D2
  source 1..42: mol_type = other RNA
taatttctactgttgtagatctgaagcaatgctccagggagg

SEQ ID NO: 4934 - RNA, 42 nt, synthetic construct
  misc_feature 1..42: note = Description of Artificial Sequence: Synthetic oligonucleotide
  misc_feature 1..42: note = Category: MG29-1 sgRNA targeting CD5
  misc_feature 1..42: note = Description: MG29-1-CD5-sgRNA-E2
  source 1..42: mol_type = other RNA
taatttctactgttgtagatccattgcttcccctctcaggtt

SEQ ID NO: 4935 - RNA, 42 nt, synthetic construct
  misc_feature 1..42: note = Description of Artificial Sequence: Synthetic oligonucleotide
  misc_feature 1..42: note = Category: MG29-1 sgRNA targeting CD5
  misc_feature 1..42: note = Description: MG29-1-CD5-sgRNA-F2
  source 1..42: mol_type = other RNA
taatttctactgttgtagatcagcccaaggtgcagagccgtc

SEQ ID NO: 4936 - RNA, 42 nt, synthetic construct
  misc_feature 1..42: note = Description of Artificial Sequence: Synthetic oligonucleotide
  misc_feature 1..42: note = Category: MG29-1 sgRNA targeting CD5
  misc_feature 1..42: note = Description: MG29-1-CD5-sgRNA-G2
  source 1..42: mol_type = other RNA
taatttctactgttgtagatggagagaaattcctactgcaag

SEQ ID NO: 4937 - RNA, 42 nt, synthetic construct
  misc_feature 1..42: note = Description of Artificial Sequence: Synthetic oligonucleotide
  misc_feature 1..42: note = Category: MG29-1 sgRNA targeting CD5
  misc_feature 1..42: note = Description: MG29-1-CD5-sgRNA-H2
  source 1..42: mol_type = other RNA
taatttctactgttgtagattctcccaaagttcgtggcactg

SEQ ID NO: 4938 - RNA, 42 nt, synthetic construct
  misc_feature 1..42: note = Description of Artificial Sequence: Synthetic oligonucleotide
  misc_feature 1..42: note = Category: MG29-1 sgRNA targeting CD5
  misc_feature 1..42: note = Description: MG29-1-CD5-sgRNA-A3
  source 1..42: mol_type = other RNA
taatttctactgttgtagatttcactagcttcttgtaggcaa

SEQ ID NO: 4939 - RNA, 42 nt, synthetic construct
  misc_feature 1..42: note = Description of Artificial Sequence: Synthetic oligonucleotide
  misc_feature 1..42: note = Category: MG29-1 sgRNA targeting CD5
  misc_feature 1..42: note = Description: MG29-1-CD5-sgRNA-B3
  source 1..42: mol_type = other RNA
taatttctactgttgtagatttgtctcttgcccagtccgcca

SEQ ID NO: 4940 - RNA, 42 nt, synthetic construct
  misc_feature 1..42: note = Description of Artificial Sequence: Synthetic oligonucleotide
  misc_feature 1..42: note = Category: MG29-1 sgRNA targeting CD5
  misc_feature 1..42: note = Description: MG29-1-CD5-sgRNA-C3
  source 1..42: mol_type = other RNA
taatttctactgttgtagatggttcattcccgttgggccaat

SEQ ID NO: 4941 - RNA, 42 nt, synthetic construct
  misc_feature 1..42: note = Description of Artificial Sequence: Synthetic oligonucleotide
  misc_feature 1..42: note = Category: MG29-1 sgRNA targeting CD5
  misc_feature 1..42: note = Description: MG29-1-CD5-sgRNA-D3
  source 1..42: mol_type = other RNA
taatttctactgttgtagatgttcattcccgttgggccaatc

SEQ ID NO: 4942 - RNA, 42 nt, synthetic construct
  misc_feature 1..42: note = Description of Artificial Sequence: Synthetic oligonucleotide
  misc_feature 1..42: note = Category: MG29-1 sgRNA targeting CD5
  misc_feature 1..42: note = Description: MG29-1-CD5-sgRNA-E3
  source 1..42: mol_type = other RNA
taatttctactgttgtagatcatcgcaaccacacggcaaccg

SEQ ID NO: 4943 - RNA, 42 nt, synthetic construct
  misc_feature 1..42: note = Description of Artificial Sequence: Synthetic oligonucleotide
  misc_feature 1..42: note = Category: MG29-1 sgRNA targeting CD5
  misc_feature 1..42: note = Description: MG29-1-CD5-sgRNA-F3
  source 1..42: mol_type = other RNA
taatttctactgttgtagattttccccagctctggaaggggc

SEQ ID NO: 4944 - RNA, 42 nt, synthetic construct
  misc_feature 1..42: note = Description of Artificial Sequence: Synthetic oligonucleotide
  misc_feature 1..42: note = Category: MG29-1 sgRNA targeting CD5
  misc_feature 1..42: note = Description: MG29-1-CD5-sgRNA-G3
  source 1..42: mol_type = other RNA
taatttctactgttgtagatcccagctctggaaggggctctg

SEQ ID NO: 4945 - RNA, 42 nt, synthetic construct
  misc_feature 1..42: note = Description of Artificial Sequence: Synthetic oligonucleotide
  misc_feature 1..42: note = Category: MG29-1 sgRNA targeting CD5
  misc_feature 1..42: note = Description: MG29-1-CD5-sgRNA-H3
  source 1..42: mol_type = other RNA
taatttctactgttgtagatcagcctctgagccccatgcaga

SEQ ID NO: 4946 - DNA, 22 bp, unidentified
  misc_feature 1..22: note = Description of Unknown: MG29-1-CD5-target site-A1 sequence
  misc_feature 1..22: note = Category: DNA sequence of CD5 target site
  source 1..22: mol_type = unassigned DNA
tgcagtcgcttcctgcctcgga

SEQ ID NO: 4947 - DNA, 22 bp, unidentified
  misc_feature 1..22: note = Description of Unknown: MG29-1-CD5-target site-B1 sequence
  misc_feature 1..22: note = Category: DNA sequence of CD5 target site
  source 1..22: mol_type = unassigned DNA
tccatgtggctcttccttacct

SEQ ID NO: 4948 - DNA, 22 bp, unidentified
  misc_feature 1..22: note = Description of Unknown: MG29-1-CD5-target site-C1 sequence
  misc_feature 1..22: note = Category: DNA sequence of CD5 target site
  source 1..22: mol_type = unassigned DNA
tgacccccagatttccaggcaa

SEQ ID NO: 4949 - DNA, 22 bp, unidentified
  misc_feature 1..22: note = Description of Unknown: MG29-1-CD5-target site-D1 sequence
  misc_feature 1..22: note = Category: DNA sequence of CD5 target site
  source 1..22: mol_type = unassigned DNA
caggcaaggctcacccgttcca

SEQ ID NO: 4950 - DNA, 22 bp, unidentified
  misc_feature 1..22: note = Description of Unknown: MG29-1-CD5-target site-E1 sequence
  misc_feature 1..22: note = Category: DNA sequence of CD5 target site
  source 1..22: mol_type = unassigned DNA
cagccagagctggggccggagc

SEQ ID NO: 4951 - DNA, 22 bp, unidentified
  misc_feature 1..22: note = Description of Unknown: MG29-1-CD5-target site-F1 sequence
  misc_feature 1..22: note = Category: DNA sequence of CD5 target site
  source 1..22: mol_type = unassigned DNA
tgctgtggctgcagttggagaa

SEQ ID NO: 4952 - DNA, 22 bp, unidentified
  misc_feature 1..22: note = Description of Unknown: MG29-1-CD5-target site-G1 sequence
  misc_feature 1..22: note = Category: DNA sequence of CD5 target site
  source 1..22: mol_type = unassigned DNA
gacgcttgactggggtcctccc

SEQ ID NO: 4953 - DNA, 22 bp, unidentified
  misc_feature 1..22: note = Description of Unknown: MG29-1-CD5-target site-H1 sequence
  misc_feature 1..22: note = Category: DNA sequence of CD5 target site
  source 1..22: mol_type = unassigned DNA
acgcttgactggggtcctccca

SEQ ID NO: 4954 - DNA, 22 bp, unidentified
  misc_feature 1..22: note = Description of Unknown: MG29-1-CD5-target site-A2 sequence
  misc_feature 1..22: note = Category: DNA sequence of CD5 target site
  source 1..22: mol_type = unassigned DNA
ctggggcttgattttcctgaag

SEQ ID NO: 4955 - DNA, 22 bp, unidentified
  misc_feature 1..22: note = Description of Unknown: MG29-1-CD5-target site-B2 sequence
  misc_feature 1..22: note = Category: DNA sequence of CD5 target site
  source 1..22: mol_type = unassigned DNA
tggggcttgattttcctgaagc

SEQ ID NO: 4956 - DNA, 22 bp, unidentified
  misc_feature 1..22: note = Description of Unknown: MG29-1-CD5-target site-C2 sequence
  misc_feature 1..22: note = Category: DNA sequence of CD5 target site
  source 1..22: mol_type = unassigned DNA
cctgaagcaatgctccagggag

SEQ ID NO: 4957 - DNA, 22 bp, unidentified
  misc_feature 1..22: note = Description of Unknown: MG29-1-CD5-target site-D2 sequence
  misc_feature 1..22: note = Category: DNA sequence of CD5 target site
  source 1..22: mol_type = unassigned DNA
ctgaagcaatgctccagggagg

SEQ ID NO: 4958 - DNA, 22 bp, unidentified
  misc_feature 1..22: note = Description of Unknown: MG29-1-CD5-target site-E2 sequence
  misc_feature 1..22: note = Category: DNA sequence of CD5 target site
  source 1..22: mol_type = unassigned DNA
ccattgcttcccctctcaggtt

SEQ ID NO: 4959 - DNA, 22 bp, unidentified
  misc_feature 1..22: note = Description of Unknown: MG29-1-CD5-target site-F2 sequence
  misc_feature 1..22: note = Category: DNA sequence of CD5 target site
  source 1..22: mol_type = unassigned DNA
cagcccaaggtgcagagccgtc

SEQ ID NO: 4960 - DNA, 22 bp, unidentified
  misc_feature 1..22: note = Description of Unknown: MG29-1-CD5-target site-G2 sequence
  misc_feature 1..22: note = Category: DNA sequence of CD5 target site
  source 1..22: mol_type = unassigned DNA
ggagagaaattcctactgcaag

SEQ ID NO: 4961 - DNA, 22 bp, unidentified
  misc_feature 1..22: note = Description of Unknown: MG29-1-CD5-target site-H2 sequence
  misc_feature 1..22: note = Category: DNA sequence of CD5 target site
  source 1..22: mol_type = unassigned DNA
tctcccaaagttcgtggcactg

SEQ ID NO: 4962 - DNA, 22 bp, unidentified
  misc_feature 1..22: note = Description of Unknown: MG29-1-CD5-target site-A3 sequence
  misc_feature 1..22: note = Category: DNA sequence of CD5 target site
  source 1..22: mol_type = unassigned DNA
ttcactagcttcttgtaggcaa

SEQ ID NO: 4963 - DNA, 22 bp, unidentified
  misc_feature 1..22: note = Description of Unknown: MG29-1-CD5-target site-B3 sequence
  misc_feature 1..22: note = Category: DNA sequence of CD5 target site
  source 1..22: mol_type = unassigned DNA
ttgtctcttgcccagtccgcca

SEQ ID NO: 4964 - DNA, 22 bp, unidentified
  misc_feature 1..22: note = Description of Unknown: MG29-1-CD5-target site-C3 sequence
  misc_feature 1..22: note = Category: DNA sequence of CD5 target site
  source 1..22: mol_type = unassigned DNA
ggttcattcccgttgggccaat

SEQ ID NO: 4965 - DNA, 22 bp, unidentified
  misc_feature 1..22: note = Description of Unknown: MG29-1-CD5-target site-D3 sequence
  misc_feature 1..22: note = Category: DNA sequence of CD5 target site
  source 1..22: mol_type = unassigned DNA
gttcattcccgttgggccaatc

SEQ ID NO: 4966 - DNA, 22 bp, unidentified
  misc_feature 1..22: note = Description of Unknown: MG29-1-CD5-target site-E3 sequence
  misc_feature 1..22: note = Category: DNA sequence of CD5 target site
  source 1..22: mol_type = unassigned DNA
catcgcaaccacacggcaaccg

SEQ ID NO: 4967 - DNA, 22 bp, unidentified
  misc_feature 1..22: note = Description of Unknown: MG29-1-CD5-target site-F3 sequence
  misc_feature 1..22: note = Category: DNA sequence of CD5 target site
  source 1..22: mol_type = unassigned DNA
tttccccagctctggaaggggc

SEQ ID NO: 4968 - DNA, 22 bp, unidentified
  misc_feature 1..22: note = Description of Unknown: MG29-1-CD5-target site-G3 sequence
  misc_feature 1..22: note = Category: DNA sequence of CD5 target site
  source 1..22: mol_type = unassigned DNA
cccagctctggaaggggctctg

SEQ ID NO: 4969 - DNA, 22 bp, unidentified
  misc_feature 1..22: note = Description of Unknown: MG29-1-CD5-target site-H3 sequence
  misc_feature 1..22: note = Category: DNA sequence of CD5 target site
  source 1..22: mol_type = unassigned DNA
cagcctctgagccccatgcaga

SEQ ID NO: 4970 - RNA, 42 nt, synthetic construct
  misc_feature 1..42: note = Description of Artificial Sequence: Synthetic oligonucleotide
  misc_feature 1..42: note = Category: MG29-1 sgRNA targeting hRosa26
  misc_feature 1..42: note = Description: MG29-1-hRosa26-sgRNA-A1
  source 1..42: mol_type = other RNA
taatttctactgttgtagataggtcactgtcctagctctcca

SEQ ID NO: 4971 - RNA, 42 nt, synthetic construct
  misc_feature 1..42: note = Description of Artificial Sequence: Synthetic oligonucleotide
  misc_feature 1..42: note = Category: MG29-1 sgRNA targeting hRosa26
  misc_feature 1..42: note = Description: MG29-1-hRosa26-sgRNA-B1
  source 1..42: mol_type = other RNA
taatttctactgttgtagattttttaggccgggcgcggtggc

SEQ ID NO: 4972 - RNA, 42 nt, synthetic construct
  misc_feature 1..42: note = Description of Artificial Sequence: Synthetic oligonucleotide
  misc_feature 1..42: note = Category: MG29-1 sgRNA targeting hRosa26
  misc_feature 1..42: note = Description: MG29-1-hRosa26-sgRNA-C1
  source 1..42: mol_type = other RNA
taatttctactgttgtagattaggccgggcgcggtggctcac

SEQ ID NO: 4973 - RNA, 42 nt, synthetic construct
  misc_feature 1..42: note = Description of Artificial Sequence: Synthetic oligonucleotide
  misc_feature 1..42: note = Category: MG29-1 sgRNA targeting hRosa26
  misc_feature 1..42: note = Description: MG29-1-hRosa26-sgRNA-D1
  source 1..42: mol_type = other RNA
taatttctactgttgtagataggccgggcgcggtggctcaca

SEQ ID NO: 4974 - RNA, 42 nt, synthetic construct
  misc_feature 1..42: note = Description of Artificial Sequence: Synthetic oligonucleotide
  misc_feature 1..42: note = Category: MG29-1 sgRNA targeting hRosa26
  misc_feature 1..42: note = Description: MG29-1-hRosa26-sgRNA-E1
  source 1..42: mol_type = other RNA
taatttctactgttgtagatggccgggcgcggtggctcacac

SEQ ID NO: 4975 - RNA, 42 nt, synthetic construct
  misc_feature 1..42: note = Description of Artificial Sequence: Synthetic oligonucleotide
  misc_feature 1..42: note = Category: MG29-1 sgRNA targeting hRosa26
  misc_feature 1..42: note = Description: MG29-1-hRosa26-sgRNA-F1
  source 1..42: mol_type = other RNA
taatttctactgttgtagatggaggccgaggcaggcagatca

SEQ ID NO: 4976 - RNA, 42 nt, synthetic construct
  misc_feature 1..42: note = Description of Artificial Sequence: Synthetic oligonucleotide
  misc_feature 1..42: note = Category: MG29-1 sgRNA targeting hRosa26
  misc_feature 1..42: note = Description: MG29-1-hRosa26-sgRNA-G1
  source 1..42: mol_type = other RNA
taatttctactgttgtagataggtcaggagttcaagaccagc

SEQ ID NO: 4977 - RNA, 42 nt, synthetic construct
  misc_feature 1..42: note = Description of Artificial Sequence: Synthetic oligonucleotide
  misc_feature 1..42: note = Category: MG29-1 sgRNA targeting hRosa26
  misc_feature 1..42: note = Description: MG29-1-hRosa26-sgRNA-H1
  source 1..42: mol_type = other RNA
taatttctactgttgtagatcagtgagctgagatcgtgccat

SEQ ID NO: 4978 - RNA, 42 nt, synthetic construct
  misc_feature 1..42: note = Description of Artificial Sequence: Synthetic oligonucleotide
  misc_feature 1..42: note = Category: MG29-1 sgRNA targeting hRosa26
  misc_feature 1..42: note = Description: MG29-1-hRosa26-sgRNA-A2
  source 1..42: mol_type = other RNA
taatttctactgttgtagatttttttggttgggtgtggtggc

SEQ ID NO: 4979 - RNA, 42 nt, synthetic construct
  misc_feature 1..42: note = Description of Artificial Sequence: Synthetic oligonucleotide
  misc_feature 1..42: note = Category: MG29-1 sgRNA targeting hRosa26
  misc_feature 1..42: note = Description: MG29-1-hRosa26-sgRNA-B2
  source 1..42: mol_type = other RNA
taatttctactgttgtagatttggttgggtgtggtggctcac

SEQ ID NO: 4980 - RNA, 42 nt, synthetic construct
  misc_feature 1..42: note = Description of Artificial Sequence: Synthetic oligonucleotide
  misc_feature 1..42: note = Category: MG29-1 sgRNA targeting hRosa26
  misc_feature 1..42: note = Description: MG29-1-hRosa26-sgRNA-C2
  source 1..42: mol_type = other RNA
taatttctactgttgtagattggttgggtgtggtggctcaca

SEQ ID NO: 4981 - RNA, 42 nt, synthetic construct
  misc_feature 1..42: note = Description of Artificial Sequence: Synthetic oligonucleotide
  misc_feature 1..42: note = Category: MG29-1 sgRNA targeting hRosa26
  misc_feature 1..42: note = Description: MG29-1-hRosa26-sgRNA-D2
  source 1..42: mol_type = other RNA
taatttctactgttgtagatggttgggtgtggtggctcacac

SEQ ID NO: 4982 - RNA, 42 nt, synthetic construct
  misc_feature 1..42: note = Description of Artificial Sequence: Synthetic oligonucleotide
  misc_feature 1..42: note = Category: MG29-1 sgRNA targeting hRosa26
  misc_feature 1..42: note = Description: MG29-1-hRosa26-sgRNA-E2
  source 1..42: mol_type = other RNA
taatttctactgttgtagatgttgggtgtggtggctcacacc

SEQ ID NO: 4983 - RNA, 42 nt, synthetic construct
  misc_feature 1..42: note = Description of Artificial Sequence: Synthetic oligonucleotide
  misc_feature 1..42: note = Category: MG29-1 sgRNA targeting hRosa26
  misc_feature 1..42: note = Description: MG29-1-hRosa26-sgRNA-F2
  source 1..42: mol_type = other RNA
taatttctactgttgtagatgaaggatgaggcagaaggatca

SEQ ID NO: 4984 - RNA, 42 nt, synthetic construct
  misc_feature 1..42: note = Description of Artificial Sequence: Synthetic oligonucleotide
  misc_feature 1..42: note = Category: MG29-1 sgRNA targeting hRosa26
  misc_feature 1..42: note = Description: MG29-1-hRosa26-sgRNA-G2
  source 1..42: mol_type = other RNA
taatttctactgttgtagatggaggccaaggcgggcggatca

SEQ ID NO: 4985 - RNA, 42 nt, synthetic construct
  misc_feature 1..42: note = Description of Artificial Sequence: Synthetic oligonucleotide
  misc_feature 1..42: note = Category: MG29-1 sgRNA targeting hRosa26
  misc_feature 1..42: note = Description: MG29-1-hRosa26-sgRNA-H2
  source 1..42: mol_type = other RNA
taatttctactgttgtagatcgccattctcctgcctcagcct

SEQ ID NO: 4986 - RNA, 42 nt, synthetic construct
  misc_feature 1..42: note = Description of Artificial Sequence: Synthetic oligonucleotide
  misc_feature 1..42: note = Category: MG29-1 sgRNA targeting hRosa26
  misc_feature 1..42: note = Description: MG29-1-hRosa26-sgRNA-A3
  source 1..42: mol_type = other RNA
taatttctactgttgtagatttgtgtttttagtagagaaggg

SEQ ID NO: 4987 - RNA, 42 nt, synthetic construct
  misc_feature 1..42: note = Description of Artificial Sequence: Synthetic oligonucleotide
  misc_feature 1..42: note = Category: MG29-1 sgRNA targeting hRosa26
  misc_feature 1..42: note = Description: MG29-1-hRosa26-sgRNA-B3
  source 1..42: mol_type = other RNA
taatttctactgttgtagattgtgtttttagtagagaagggg

SEQ ID NO: 4988 - RNA, 42 nt, synthetic construct
  misc_feature 1..42: note = Description of Artificial Sequence: Synthetic oligonucleotide
  misc_feature 1..42: note = Category: MG29-1 sgRNA targeting hRosa26
  misc_feature 1..42: note = Description: MG29-1-hRosa26-sgRNA-C3
  source 1..42: mol_type = other RNA
taatttctactgttgtagatgtgtttttagtagagaaggggt

SEQ ID NO: 4989 - RNA, 42 nt, synthetic construct
  misc_feature 1..42: note = Description of Artificial Sequence: Synthetic oligonucleotide
  misc_feature 1..42: note = Category: MG29-1 sgRNA targeting hRosa26
  misc_feature 1..42: note = Description: MG29-1-hRosa26-sgRNA-D3
  source 1..42: mol_type = other RNA
taatttctactgttgtagattgtttttagtagagaaggggtt

SEQ ID NO: 4990 - RNA, 42 nt, synthetic construct
  misc_feature 1..42: note = Description of Artificial Sequence: Synthetic oligonucleotide
  misc_feature 1..42: note = Category: MG29-1 sgRNA targeting hRosa26
  misc_feature 1..42: note = Description: MG29-1-hRosa26-sgRNA-E3
  source 1..42: mol_type = other RNA
taatttctactgttgtagattagtagagaaggggtttcaccg

SEQ ID NO: 4991 - RNA, 42 nt, synthetic construct
  misc_feature 1..42: note = Description of Artificial Sequence: Synthetic oligonucleotide
  misc_feature 1..42: note = Category: MG29-1 sgRNA targeting hRosa26
  misc_feature 1..42: note = Description: MG29-1-hRosa26-sgRNA-F3
  source 1..42: mol_type = other RNA
taatttctactgttgtagatagtagagaaggggtttcaccgt

SEQ ID NO: 4992 - RNA, 42 nt, synthetic construct
  misc_feature 1..42: note = Description of Artificial Sequence: Synthetic oligonucleotide
  misc_feature 1..42: note = Category: MG29-1 sgRNA targeting hRosa26
  misc_feature 1..42: note = Description: MG29-1-hRosa26-sgRNA-G3
  source 1..42: mol_type = other RNA
taatttctactgttgtagatgtagagaaggggtttcaccgtg

SEQ ID NO: 4993 - RNA, 42 nt, synthetic construct
  misc_feature 1..42: note = Description of Artificial Sequence: Synthetic oligonucleotide
  misc_feature 1..42: note = Category: MG29-1 sgRNA targeting hRosa26
  misc_feature 1..42: note = Description: MG29-1-hRosa26-sgRNA-H3
  source 1..42: mol_type = other RNA
taatttctactgttgtagataccgtgttagccaggatggtct

SEQ ID NO: 4994 - RNA, 42 nt, synthetic construct
  misc_feature 1..42: note = Description of Artificial Sequence: Synthetic oligonucleotide
  misc_feature 1..42: note = Category: MG29-1 sgRNA targeting hRosa26
  misc_feature 1..42: note = Description: MG29-1-hRosa26-sgRNA-A4
  source 1..42: mol_type = other RNA
taatttctactgttgtagatgaactccttggctcaagtgatc

SEQ ID NO: 4995 - RNA, 42 nt, synthetic construct
  misc_feature 1..42: note = Description of Artificial Sequence: Synthetic oligonucleotide
  misc_feature 1..42: note = Category: MG29-1 sgRNA targeting hRosa26
  misc_feature 1..42: note = Description: MG29-1-hRosa26-sgRNA-B4
  source 1..42: mol_type = other RNA
taatttctactgttgtagataactccttggctcaagtgatcc

SEQ ID NO: 4996 - RNA, 42 nt, synthetic construct
  misc_feature 1..42: note = Description of Artificial Sequence: Synthetic oligonucleotide
  misc_feature 1..42: note = Category: MG29-1 sgRNA targeting hRosa26
  misc_feature 1..42: note = Description: MG29-1-hRosa26-sgRNA-C4
  source 1..42: mol_type = other RNA
taatttctactgttgtagatttttttttcttgagtcagagtc

SEQ ID NO: 4997 - RNA, 42 nt, synthetic construct
  misc_feature 1..42: note = Description of Artificial Sequence: Synthetic oligonucleotide
  misc_feature 1..42: note = Category: MG29-1 sgRNA targeting hRosa26
  misc_feature 1..42: note = Description: MG29-1-hRosa26-sgRNA-D4
  source 1..42: mol_type = other RNA
taatttctactgttgtagatttttcttgagtcagagtcttgc

SEQ ID NO: 4998 - RNA, 42 nt, synthetic construct
  misc_feature 1..42: note = Description of Artificial Sequence: Synthetic oligonucleotide
  misc_feature 1..42: note = Category: MG29-1 sgRNA targeting hRosa26
  misc_feature 1..42: note = Description: MG29-1-hRosa26-sgRNA-E4
  source 1..42: mol_type = other RNA
taatttctactgttgtagattttcttgagtcagagtcttgct

SEQ ID NO: 4999 - RNA, 42 nt, synthetic construct
  misc_feature 1..42: note = Description of Artificial Sequence: Synthetic oligonucleotide
  misc_feature 1..42: note = Category: MG29-1 sgRNA targeting hRosa26
  misc_feature 1..42: note = Description: MG29-1-hRosa26-sgRNA-F4
  source 1..42: mol_type = other RNA
taatttctactgttgtagatttcttgagtcagagtcttgctc

SEQ ID NO: 5000 - RNA, 42 nt, synthetic construct
  misc_feature 1..42: note = Description of Artificial Sequence: Synthetic oligonucleotide
  misc_feature 1..42: note = Category: MG29-1 sgRNA targeting hRosa26
  misc_feature 1..42: note = Description: MG29-1-hRosa26-sgRNA-G4
  source 1..42: mol_type = other RNA
taatttctactgttgtagattcttgagtcagagtcttgctcc

SEQ ID NO: 5001 - RNA, 42 nt, synthetic construct
  misc_feature 1..42: note = Description of Artificial Sequence: Synthetic oligonucleotide
  misc_feature 1..42: note = Category: MG29-1 sgRNA targeting hRosa26
  misc_feature 1..42: note = Description: MG29-1-hRosa26-sgRNA-H4
  source 1..42: mol_type = other RNA
taatttctactgttgtagatcttgagtcagagtcttgctccg

SEQ ID NO: 5002 - RNA, 42 nt, synthetic construct
  misc_feature 1..42: note = Description of Artificial Sequence: Synthetic oligonucleotide
  misc_feature 1..42: note = Category: MG29-1 sgRNA targeting hRosa26
  misc_feature 1..42: note = Description: MG29-1-hRosa26-sgRNA-A5
  source 1..42: mol_type = other RNA
taatttctactgttgtagatttgagtcagagtcttgctccgt

SEQ ID NO: 5003 - RNA, 42 nt, synthetic construct
  misc_feature 1..42: note = Description of Artificial Sequence: Synthetic oligonucleotide
  misc_feature 1..42: note = Category: MG29-1 sgRNA targeting hRosa26
  misc_feature 1..42: note = Description: MG29-1-hRosa26-sgRNA-B5
  source 1..42: mol_type = other RNA
taatttctactgttgtagattgtatttttagtagagatgggg

SEQ ID NO: 5004 - RNA, 42 nt, synthetic construct
  misc_feature 1..42: note = Description of Artificial Sequence: Synthetic oligonucleotide
  misc_feature 1..42: note = Category: MG29-1 sgRNA targeting hRosa26
  misc_feature 1..42: note = Description: MG29-1-hRosa26-sgRNA-C5
  source 1..42: mol_type = other RNA
taatttctactgttgtagatgtatttttagtagagatggggt

SEQ ID NO: 5005 - RNA, 42 nt, synthetic construct
  misc_feature 1..42: note = Description of Artificial Sequence: Synthetic oligonucleotide
  misc_feature 1..42: note = Category: MG29-1 sgRNA targeting hRosa26
  misc_feature 1..42: note = Description: MG29-1-hRosa26-sgRNA-D5
  source 1..42: mol_type = other RNA
taatttctactgttgtagattatttttagtagagatggggtt

SEQ ID NO: 5006 - RNA, 42 nt, synthetic construct
  misc_feature 1..42: note = Description of Artificial Sequence: Synthetic oligonucleotide
  misc_feature 1..42: note = Category: MG29-1 sgRNA targeting hRosa26
  misc_feature 1..42: note = Description: MG29-1-hRosa26-sgRNA-E5
  source 1..42: mol_type = other RNA
taatttctactgttgtagattagtagagatggggtttcacca

SEQ ID NO: 5007 - RNA, 42 nt, synthetic construct
  misc_feature 1..42: note = Description of Artificial Sequence: Synthetic oligonucleotide
  misc_feature 1..42: note = Category: MG29-1 sgRNA targeting hRosa26
  misc_feature 1..42: note = Description: MG29-1-hRosa26-sgRNA-F5
  source 1..42: mol_type = other RNA
taatttctactgttgtagatagtagagatggggtttcaccac

SEQ ID NO: 5008 - RNA, 42 nt, synthetic construct
  misc_feature 1..42: note = Description of Artificial Sequence: Synthetic oligonucleotide
  misc_feature 1..42: note = Category: MG29-1 sgRNA targeting hRosa26
  misc_feature 1..42: note = Description: MG29-1-hRosa26-sgRNA-G5
  source 1..42: mol_type = other RNA
taatttctactgttgtagatgtagagatggggtttcaccacg

SEQ ID NO: 5009 - RNA, 42 nt, synthetic construct
  misc_feature 1..42: note = Description of Artificial Sequence: Synthetic oligonucleotide
  misc_feature 1..42: note = Category: MG29-1 sgRNA targeting hRosa26
  misc_feature 1..42: note = Description: MG29-1-hRosa26-sgRNA-H5
  source 1..42: mol_type = other RNA
taatttctactgttgtagataccacgttggtcaggctggtct

SEQ ID NO: 5010 - RNA, 42 nt, synthetic construct
  misc_feature 1..42: note = Description of Artificial Sequence: Synthetic oligonucleotide
  misc_feature 1..42: note = Category: MG29-1 sgRNA targeting hRosa26
  misc_feature 1..42: note = Description: MG29-1-hRosa26-sgRNA-A6
  source 1..42: mol_type = other RNA
taatttctactgttgtagataccttcctgtgacttcctggag

SEQ ID NO: 5011 - RNA, 42 nt, synthetic construct
  misc_feature 1..42: note = Description of Artificial Sequence: Synthetic oligonucleotide
  misc_feature 1..42: note = Category: MG29-1 sgRNA targeting hRosa26
  misc_feature 1..42: note = Description: MG29-1-hRosa26-sgRNA-B6
  source 1..42: mol_type = other RNA
taatttctactgttgtagatccttcctgtgacttcctggaga

SEQ ID NO: 5012 - RNA, 42 nt, synthetic construct
  misc_feature 1..42: note = Description of Artificial Sequence: Synthetic oligonucleotide
  misc_feature 1..42: note = Category: MG29-1 sgRNA targeting hRosa26
  misc_feature 1..42: note = Description: MG29-1-hRosa26-sgRNA-C6
  source 1..42: mol_type = other RNA
taatttctactgttgtagattggggaaggttctctgtctgcc

SEQ ID NO: 5013 - DNA, 22 bp, unidentified
  misc_feature 1..22: note = Description of Unknown: MG29-1-hRosa26-target site-A1 sequence
  misc_feature 1..22: note = Category: DNA sequence of hRosa26 target site
  source 1..22: mol_type = unassigned DNA
aggtcactgtcctagctctcca

SEQ ID NO: 5014 - DNA, 22 bp, unidentified
  misc_feature 1..22: note = Description of Unknown: MG29-1-hRosa26-target site-B1 sequence
  misc_feature 1..22: note = Category: DNA sequence of hRosa26 target site
  source 1..22: mol_type = unassigned DNA
tttttaggccgggcgcggtggc

SEQ ID NO: 5015 - DNA, 22 bp, unidentified
  misc_feature 1..22: note = Description of Unknown: MG29-1-hRosa26-target site-C1 sequence
  misc_feature 1..22: note = Category: DNA sequence of hRosa26 target site
  source 1..22: mol_type = unassigned DNA
taggccgggcgcggtggctcac

SEQ ID NO: 5016 - DNA, 22 bp, unidentified
  misc_feature 1..22: note = Description of Unknown: MG29-1-hRosa26-target site-D1 sequence
  misc_feature 1..22: note = Category: DNA sequence of hRosa26 target site
  source 1..22: mol_type = unassigned DNA
aggccgggcgcggtggctcaca

SEQ ID NO: 5017 - DNA, 22 bp, unidentified
  misc_feature 1..22: note = Description of Unknown: MG29-1-hRosa26-target site-E1 sequence
  misc_feature 1..22: note = Category: DNA sequence of hRosa26 target site
  source 1..22: mol_type = unassigned DNA
ggccgggcgcggtggctcacac

SEQ ID NO: 5018 - DNA, 22 bp, unidentified
  misc_feature 1..22: note = Description of Unknown: MG29-1-hRosa26-target site-F1 sequence
  misc_feature 1..22: note = Category: DNA sequence of hRosa26 target site
  source 1..22: mol_type = unassigned DNA
ggaggccgaggcaggcagatca

SEQ ID NO: 5019 - DNA, 22 bp, unidentified
  misc_feature 1..22: note = Description of Unknown: MG29-1-hRosa26-target site-G1 sequence
  misc_feature 1..22: note = Category: DNA sequence of hRosa26 target site
  source 1..22: mol_type = unassigned DNA
aggtcaggagttcaagaccagc

SEQ ID NO: 5020 - DNA, 22 bp, unidentified
  misc_feature 1..22: note = Description of Unknown: MG29-1-hRosa26-target site-H1 sequence
  misc_feature 1..22: note = Category: DNA sequence of hRosa26 target site
  source 1..22: mol_type = unassigned DNA
cagtgagctgagatcgtgccat

SEQ ID NO: 5021 - DNA, 22 bp, unidentified
  misc_feature 1..22: note = Description of Unknown: MG29-1-hRosa26-target site-A2 sequence
  misc_feature 1..22: note = Category: DNA sequence of hRosa26 target site
  source 1..22: mol_type = unassigned DNA
ttttttggttgggtgtggtggc

SEQ ID NO: 5022 - DNA, 22 bp, unidentified
  misc_feature 1..22: note = Description of Unknown: MG29-1-hRosa26-target site-B2 sequence
  misc_feature 1..22: note = Category: DNA sequence of hRosa26 target site
  source 1..22: mol_type = unassigned DNA
ttggttgggtgtggtggctcac

SEQ ID NO: 5023 - DNA, 22 bp, unidentified
  misc_feature 1..22: note = Description of Unknown: MG29-1-hRosa26-target site-C2 sequence
  misc_feature 1..22: note = Category: DNA sequence of hRosa26 target site
  source 1..22: mol_type = unassigned DNA
tggttgggtgtggtggctcaca

SEQ ID NO: 5024 - DNA, 22 bp, unidentified
  misc_feature 1..22: note = Description of Unknown: MG29-1-hRosa26-target site-D2 sequence
  misc_feature 1..22: note = Category: DNA sequence of hRosa26 target site
  source 1..22: mol_type = unassigned DNA
ggttgggtgtggtggctcacac

SEQ ID NO: 5025 - DNA, 22 bp, unidentified
  misc_feature 1..22: note = Description of Unknown: MG29-1-hRosa26-target site-E2 sequence
  misc_feature 1..22: note = Category: DNA sequence of hRosa26 target site
  source 1..22: mol_type = unassigned DNA
gttgggtgtggtggctcacacc

SEQ ID NO: 5026 - DNA, 22 bp, unidentified
  misc_feature 1..22: note = Description of Unknown: MG29-1-hRosa26-target site-F2 sequence
  misc_feature 1..22: note = Category: DNA sequence of hRosa26 target site
  source 1..22: mol_type = unassigned DNA
gaaggatgaggcagaaggatca

SEQ ID NO: 5027 - DNA, 22 bp, unidentified
  misc_feature 1..22: note = Description of Unknown: MG29-1-hRosa26-target site-G2 sequence
  misc_feature 1..22: note = Category: DNA sequence of hRosa26 target site
  source 1..22: mol_type = unassigned DNA
ggaggccaaggcgggcggatca

SEQ ID NO: 5028 - DNA, 22 bp, unidentified
  misc_feature 1..22: note = Description of Unknown: MG29-1-hRosa26-target site-H2 sequence
  misc_feature 1..22: note = Category: DNA sequence of hRosa26 target site
  source 1..22: mol_type = unassigned DNA
cgccattctcctgcctcagcct

SEQ ID NO: 5029 - DNA, 22 bp, unidentified
  misc_feature 1..22: note = Description of Unknown: MG29-1-hRosa26-target site-A3 sequence
  misc_feature 1..22: note = Category: DNA sequence of hRosa26 target site
  source 1..22: mol_type = unassigned DNA
ttgtgtttttagtagagaaggg

SEQ ID NO: 5030 - DNA, 22 bp, unidentified
  misc_feature 1..22: note = Description of Unknown: MG29-1-hRosa26-target site-B3 sequence
  misc_feature 1..22: note = Category: DNA sequence of hRosa26 target site
  source 1..22: mol_type = unassigned DNA
tgtgtttttagtagagaagggg

SEQ ID NO: 5031 - DNA, 22 bp, unidentified
  misc_feature 1..22: note = Description of Unknown: MG29-1-hRosa26-target site-C3 sequence
  misc_feature 1..22: note = Category: DNA sequence of hRosa26 target site
  source 1..22: mol_type = unassigned DNA
gtgtttttagtagagaaggggt

SEQ ID NO: 5032 - DNA, 22 bp, unidentified
  misc_feature 1..22: note = Description of Unknown: MG29-1-hRosa26-target site-D3 sequence
  misc_feature 1..22: note = Category: DNA sequence of hRosa26 target site
  source 1..22: mol_type = unassigned DNA
tgtttttagtagagaaggggtt

SEQ ID NO: 5033 - DNA, 22 bp, unidentified
  misc_feature 1..22: note = Description of Unknown: MG29-1-hRosa26-target site-E3 sequence
  misc_feature 1..22: note = Category: DNA sequence of hRosa26 target site
  source 1..22: mol_type = unassigned DNA
tagtagagaaggggtttcaccg

SEQ ID NO: 5034 - DNA, 22 bp, unidentified
  misc_feature 1..22: note = Description of Unknown: MG29-1-hRosa26-target site-F3 sequence
  misc_feature 1..22: note = Category: DNA sequence of hRosa26 target site
  source 1..22: mol_type = unassigned DNA
agtagagaaggggtttcaccgt

SEQ ID NO: 5035 - DNA, 22 bp, unidentified
  misc_feature 1..22: note = Description of Unknown: MG29-1-hRosa26-target site-G3 sequence
  misc_feature 1..22: note = Category: DNA sequence of hRosa26 target site
  source 1..22: mol_type = unassigned DNA
gtagagaaggggtttcaccgtg

SEQ ID NO: 5036 - DNA, 22 bp, unidentified
  misc_feature 1..22: note = Description of Unknown: MG29-1-hRosa26-target site-H3 sequence
  misc_feature 1..22: note = Category: DNA sequence of hRosa26 target site
  source 1..22: mol_type = unassigned DNA
accgtgttagccaggatggtct

SEQ ID NO: 5037 - DNA, 22 bp, unidentified
  misc_feature 1..22: note = Description of Unknown: MG29-1-hRosa26-target site-A4 sequence
  misc_feature 1..22: note = Category: DNA sequence of hRosa26 target site
  source 1..22: mol_type = unassigned DNA
gaactccttggctcaagtgatc

SEQ ID NO: 5038 - DNA, 22 bp, unidentified
  misc_feature 1..22: note = Description of Unknown: MG29-1-hRosa26-target site-B4 sequence
  misc_feature 1..22: note = Category: DNA sequence of hRosa26 target site
  source 1..22: mol_type = unassigned DNA
aactccttggctcaagtgatcc

SEQ ID NO: 5039 - DNA, 22 bp, unidentified
  misc_feature 1..22: note = Description of Unknown: MG29-1-hRosa26-target site-C4 sequence
  misc_feature 1..22: note = Category: DNA sequence of hRosa26 target site
  source 1..22: mol_type = unassigned DNA
ttttttttcttgagtcagagtc

SEQ ID NO: 5040 - DNA, 22 bp, unidentified
  misc_feature 1..22: note = Description of Unknown: MG29-1-hRosa26-target site-D4 sequence
  misc_feature 1..22: note = Category: DNA sequence of hRosa26 target site
  source 1..22: mol_type = unassigned DNA
ttttcttgagtcagagtcttgc

SEQ ID NO: 5041 - DNA, 22 bp, unidentified
  misc_feature 1..22: note = Description of Unknown: MG29-1-hRosa26-target site-E4 sequence
  misc_feature 1..22: note = Category: DNA sequence of hRosa26 target site
  source 1..22: mol_type = unassigned DNA
tttcttgagtcagagtcttgct

SEQ ID NO: 5042 - DNA, 22 bp, unidentified
  misc_feature 1..22: note = Description of Unknown: MG29-1-hRosa26-target site-F4 sequence
  misc_feature 1..22: note = Category: DNA sequence of hRosa26 target site
  source 1..22: mol_type = unassigned DNA
ttcttgagtcagagtcttgctc

SEQ ID NO: 5043 - DNA, 22 bp, unidentified
  misc_feature 1..22: note = Description of Unknown: MG29-1-hRosa26-target site-G4 sequence
  misc_feature 1..22: note = Category: DNA sequence of hRosa26 target site
  source 1..22: mol_type = unassigned DNA
tcttgagtcagagtcttgctcc

SEQ ID NO: 5044 - DNA, 22 bp, unidentified
  misc_feature 1..22: note = Description of Unknown: MG29-1-hRosa26-target site-H4 sequence
  misc_feature 1..22: note = Category: DNA sequence of hRosa26 target site
  source 1..22: mol_type = unassigned DNA
cttgagtcagagtcttgctccg

SEQ ID NO: 5045 - DNA, 22 bp, unidentified
  misc_feature 1..22: note = Description of Unknown: MG29-1-hRosa26-target site-A5 sequence
  misc_feature 1..22: note = Category: DNA sequence of hRosa26 target site
  source 1..22: mol_type = unassigned DNA
ttgagtcagagtcttgctccgt

SEQ ID NO: 5046 - DNA, 22 bp, unidentified
  misc_feature 1..22: note = Description of Unknown: MG29-1-hRosa26-target site-B5 sequence
  misc_feature 1..22: note = Category: DNA sequence of hRosa26 target site
  source 1..22: mol_type = unassigned DNA
tgtatttttagtagagatgggg

SEQ ID NO: 5047 - DNA, 22 bp, unidentified
  misc_feature 1..22: note = Description of Unknown: MG29-1-hRosa26-target site-C5 sequence
  misc_feature 1..22: note = Category: DNA sequence of hRosa26 target site
  source 1..22: mol_type = unassigned DNA
gtatttttagtagagatggggt

SEQ ID NO: 5048 - DNA, 22 bp, unidentified
  misc_feature 1..22: note = Description of Unknown: MG29-1-hRosa26-target site-D5 sequence
  misc_feature 1..22: note = Category: DNA sequence of hRosa26 target site
  source 1..22: mol_type = unassigned DNA
tatttttagtagagatggggtt

SEQ ID NO: 5049 - DNA, 22 bp, unidentified
  misc_feature 1..22: note = Description of Unknown: MG29-1-hRosa26-target site-E5 sequence
  misc_feature 1..22: note = Category: DNA sequence of hRosa26 target site
  source 1..22: mol_type = unassigned DNA
tagtagagatggggtttcacca

SEQ ID NO: 5050 - DNA, 22 bp, unidentified
  misc_feature 1..22: note = Description of Unknown: MG29-1-hRosa26-target site-F5 sequence
  misc_feature 1..22: note = Category: DNA sequence of hRosa26 target site
  source 1..22: mol_type = unassigned DNA
agtagagatggggtttcaccac

SEQ ID NO: 5051 - DNA, 22 bp, unidentified
  misc_feature 1..22: note = Description of Unknown: MG29-1-hRosa26-target site-G5 sequence
  misc_feature 1..22: note = Category: DNA sequence of hRosa26 target site
  source 1..22: mol_type = unassigned DNA
gtagagatggggtttcaccacg

SEQ ID NO: 5052 - DNA, 22 bp, unidentified
  misc_feature 1..22: note = Description of Unknown: MG29-1-hRosa26-target site-H5 sequence
  misc_feature 1..22: note = Category: DNA sequence of hRosa26 target site
  source 1..22: mol_type = unassigned DNA
accacgttggtcaggctggtct

SEQ ID NO: 5053 - DNA, 22 bp, unidentified
  misc_feature 1..22: note = Description of Unknown: MG29-1-hRosa26-target site-A6 sequence
  misc_feature 1..22: note = Category: DNA sequence of hRosa26 target site
  source 1..22: mol_type = unassigned DNA
accttcctgtgacttcctggag

SEQ ID NO: 5054 - DNA, 22 bp, unidentified
  misc_feature 1..22: note = Description of Unknown: MG29-1-hRosa26-target site-B6 sequence
  misc_feature 1..22: note = Category: DNA sequence of hRosa26 target site
  source 1..22: mol_type = unassigned DNA
ccttcctgtgacttcctggaga

SEQ ID NO: 5055 - DNA, 22 bp, unidentified
  misc_feature 1..22: note = Description of Unknown: MG29-1-hRosa26-target site-C6 sequence
  misc_feature 1..22: note = Category: DNA sequence of hRosa26 target site
  source 1..22: mol_type = unassigned DNA
tggggaaggttctctgtctgcc

SEQ ID NO: 5056 - RNA, 42 nt, synthetic construct
  misc_feature 1..42: note = Description of Artificial Sequence: Synthetic oligonucleotide
  misc_feature 1..42: note = Category: MG29-1 sgRNA targeting mouse TRAC
  misc_feature 1..42: note = Description: MG29-1-mTRAC-sgRNA-A1
  source 1..42: mol_type = other RNA
taatttctactgttgtagatactcccaaatcaatgtgccgaa

SEQ ID NO: 5057 - RNA, 42 nt, synthetic construct
  misc_feature 1..42: note = Description of Artificial Sequence: Synthetic oligonucleotide
  misc_feature 1..42: note = Category: MG29-1 sgRNA targeting mouse TRAC
  misc_feature 1..42: note = Description: MG29-1-mTRAC-sgRNA-B1
  source 1..42: mol_type = other RNA
taatttctactgttgtagataagatatcttggcaggtgaagc

SEQ ID NO: 5058 - RNA, 42 nt, synthetic construct
  misc_feature 1..42: note = Description of Artificial Sequence: Synthetic oligonucleotide
  misc_feature 1..42: note = Category: MG29-1 sgRNA targeting mouse TRAC
  misc_feature 1..42: note = Description: MG29-1-mTRAC-sgRNA-C1
  source 1..42: mol_type = other RNA
taatttctactgttgtagatatgtccagcacagttttgtcag

SEQ ID NO: 5059 - RNA, 42 nt, synthetic construct
  misc_feature 1..42: note = Description of Artificial Sequence: Synthetic oligonucleotide
  misc_feature 1..42: note = Category: MG29-1 sgRNA targeting mouse TRAC
  misc_feature 1..42: note = Description: MG29-1-mTRAC-sgRNA-D1
  source 1..42: mol_type = other RNA
taatttctactgttgtagatgtcagtgatgaacgttccagat

SEQ ID NO: 5060 - RNA, 42 nt, synthetic construct
  misc_feature 1..42: note = Description of Artificial Sequence: Synthetic oligonucleotide
  misc_feature 1..42: note = Category: MG29-1 sgRNA targeting mouse TRAC
  misc_feature 1..42: note = Description: MG29-1-mTRAC-sgRNA-E1
  source 1..42: mol_type = other RNA
taatttctactgttgtagattcagtgatgaacgttccagatt

SEQ ID NO: 5061 - RNA, 42 nt, synthetic construct
  misc_feature 1..42: note = Description of Artificial Sequence: Synthetic oligonucleotide
  misc_feature 1..42: note = Category: MG29-1 sgRNA targeting mouse TRAC
  misc_feature 1..42: note = Description: MG29-1-mTRAC-sgRNA-F1
  source 1..42: mol_type = other RNA
taatttctactgttgtagatcggcacattgatttgggagtca

SEQ ID NO: 5062 - RNA, 42 nt, synthetic construct
  misc_feature 1..42: note = Description of Artificial Sequence: Synthetic oligonucleotide
  misc_feature 1..42: note = Category: MG29-1 sgRNA targeting mouse TRAC
  misc_feature 1..42: note = Description: MG29-1-mTRAC-sgRNA-G1
  source 1..42: mol_type = other RNA
taatttctactgttgtagatggcacattgatttgggagtcaa

SEQ ID NO: 5063 - RNA, 42 nt, synthetic construct
  misc_feature 1..42: note = Description of Artificial Sequence: Synthetic oligonucleotide
  misc_feature 1..42: note = Category: MG29-1 sgRNA targeting mouse TRAC
  misc_feature 1..42: note = Description: MG29-1-mTRAC-sgRNA-H1
  source 1..42: mol_type = other RNA
taatttctactgttgtagatggagtcaaagtcggtgaacagg

SEQ ID NO: 5064 - RNA, 42 nt, synthetic construct
  misc_feature 1..42: note = Description of Artificial Sequence: Synthetic oligonucleotide
  misc_feature 1..42: note = Category: MG29-1 sgRNA targeting mouse TRAC
  misc_feature 1..42: note = Description: MG29-1-mTRAC-sgRNA-A2
  source 1..42: mol_type = other RNA
taatttctactgttgtagataactggtacacagcaggttctg

SEQ ID NO: 5065 - RNA, 42 nt, synthetic construct
  misc_feature 1..42: note = Description of Artificial Sequence: Synthetic oligonucleotide
  misc_feature 1..42: note = Category: MG29-1 sgRNA targeting mouse TRAC
  misc_feature 1..42: note = Description: MG29-1-mTRAC-sgRNA-B2
  source 1..42: mol_type = other RNA
taatttctactgttgtagatactggtacacagcaggttctgg

SEQ ID NO: 5066 - RNA, 42 nt, synthetic construct
  misc_feature 1..42: note = Description of Artificial Sequence: Synthetic oligonucleotide
  misc_feature 1..42: note = Category: MG29-1 sgRNA targeting mouse TRAC
  misc_feature 1..42: note = Description: MG29-1-mTRAC-sgRNA-C2
  source 1..42: mol_type = other RNA
taatttctactgttgtagatttttcccttttagacgttccct

SEQ ID NO: 5067 - RNA, 42 nt, synthetic construct
  misc_feature 1..42: note = Description of Artificial Sequence: Synthetic oligonucleotide
  misc_feature 1..42: note = Category: MG29-1 sgRNA targeting mouse TRAC
  misc_feature 1..42: note = Description: MG29-1-mTRAC-sgRNA-D2
  source 1..42: mol_type = other RNA
taatttctactgttgtagatcccttttagacgttccctgtga

SEQ ID NO: 5068 - RNA, 42 nt, synthetic construct
  misc_feature 1..42: note = Description of Artificial Sequence: Synthetic oligonucleotide
  misc_feature 1..42: note = Category: MG29-1 sgRNA targeting mouse TRAC
  misc_feature 1..42: note = Description: MG29-1-mTRAC-sgRNA-E2
  source 1..42: mol_type = other RNA
taatttctactgttgtagatccttttagacgttccctgtgat

SEQ ID NO: 5069 - RNA, 42 nt, synthetic construct
  misc_feature 1..42: note = Description of Artificial Sequence: Synthetic oligonucleotide
  misc_feature 1..42: note = Category: MG29-1 sgRNA targeting mouse TRAC
  misc_feature 1..42: note = Description: MG29-1-mTRAC-sgRNA-F2
  source 1..42: mol_type = other RNA
taatttctactgttgtagatagacgttccctgtgatgccacg

SEQ ID NO: 5070 - RNA, 42 nt, synthetic construct
  misc_feature 1..42: note = Description of Artificial Sequence: Synthetic oligonucleotide
  misc_feature 1..42: note = Category: MG29-1 sgRNA targeting mouse TRAC
  misc_feature 1..42: note = Description: MG29-1-mTRAC-sgRNA-G2
  source 1..42: mol_type = other RNA
taatttctactgttgtagatgacgttccctgtgatgccacgt

SEQ ID NO: 5071 - RNA, 42 nt, synthetic construct
  misc_feature 1..42: note = Description of Artificial Sequence: Synthetic oligonucleotide
  misc_feature 1..42: note = Category: MG29-1 sgRNA targeting mouse TRAC
  misc_feature 1..42: note = Description: MG29-1-mTRAC-sgRNA-H2
  source 1..42: mol_type = other RNA
taatttctactgttgtagataaagcttttctcagtcaacgtg

SEQ ID NO: 5072 - RNA, 42 nt, synthetic construct
  misc_feature 1..42: note = Description of Artificial Sequence: Synthetic oligonucleotide
  misc_feature 1..42: note = Category: MG29-1 sgRNA targeting mouse TRAC
  misc_feature 1..42: note = Description: MG29-1-mTRAC-sgRNA-A3
  source 1..42: mol_type = other RNA
taatttctactgttgtagatctcagtcaacgtggcatcacag

SEQ ID NO: 5073 - RNA, 42 nt, synthetic construct
  misc_feature 1..42: note = Description of Artificial Sequence: Synthetic oligonucleotide
  misc_feature 1..42: note = Category: MG29-1 sgRNA targeting mouse TRAC
  misc_feature 1..42: note = Description: MG29-1-mTRAC-sgRNA-B3
  source 1..42: mol_type = other RNA
taatttctactgttgtagattcagtcaacgtggcatcacagg

SEQ ID NO: 5074 - RNA, 42 nt, synthetic construct
  misc_feature 1..42: note = Description of Artificial Sequence: Synthetic oligonucleotide
  misc_feature 1..42: note = Category: MG29-1 sgRNA targeting mouse TRAC
  misc_feature 1..42: note = Description: MG29-1-mTRAC-sgRNA-C3
  source 1..42: mol_type = other RNA
taatttctactgttgtagatacagatatgaacctaaactttc

SEQ ID NO: 5075 - RNA, 42 nt, synthetic construct
  misc_feature 1..42: note = Description of Artificial Sequence: Synthetic oligonucleotide
  misc_feature 1..42: note = Category: MG29-1 sgRNA targeting mouse TRAC
  misc_feature 1..42: note = Description: MG29-1-mTRAC-sgRNA-D3
  source 1..42: mol_type = other RNA
taatttctactgttgtagatcagatatgaacctaaactttca

SEQ ID NO: 5076 - RNA, 42 nt, synthetic construct
  misc_feature 1..42: note = Description of Artificial Sequence: Synthetic oligonucleotide
  misc_feature 1..42: note = Category: MG29-1 sgRNA targeting mouse TRAC
  misc_feature 1..42: note = Description: MG29-1-mTRAC-sgRNA-E3
  source 1..42: mol_type = other RNA
taatttctactgttgtagataaaacctgtcagttatgggact

SEQ ID NO: 5077 - RNA, 42 nt, synthetic construct
  misc_feature 1..42: note = Description of Artificial Sequence: Synthetic oligonucleotide
  misc_feature 1..42: note = Category: MG29-1 sgRNA targeting mouse TRAC
  misc_feature 1..42: note = Description: MG29-1-mTRAC-sgRNA-F3
  source 1..42: mol_type = other RNA
taatttctactgttgtagatacctgctcatgacgctgaggct

SEQ ID NO: 5078 - RNA, 42 nt, synthetic construct
  misc_feature 1..42: note = Description of Artificial Sequence: Synthetic oligonucleotide
  misc_feature 1..42: note = Category: MG29-1 sgRNA targeting mouse TRAC
  misc_feature 1..42: note = Description: MG29-1-mTRAC-sgRNA-G3
  source 1..42: mol_type = other RNA
taatttctactgttgtagatatgccttcttacctcaactgga

SEQ ID NO: 5079 - RNA, 42 nt, synthetic construct
  misc_feature 1..42: note = Description of Artificial Sequence: Synthetic oligonucleotide
  misc_feature 1..42: note = Category: MG29-1 sgRNA targeting mouse TRAC
  misc_feature 1..42: note = Description: MG29-1-mTRAC-sgRNA-H3
  source 1..42: mol_type = other RNA
taatttctactgttgtagatagcaggaggattcggagtccca

SEQ ID NO: 5080 - RNA, 42 nt, synthetic construct
  misc_feature 1..42: note = Description of Artificial Sequence: Synthetic oligonucleotide
  misc_feature 1..42: note = Category: MG29-1 sgRNA targeting mouse TRAC
  misc_feature 1..42: note = Description: MG29-1-mTRAC-sgRNA-A4
  source 1..42: mol_type = other RNA
taatttctactgttgtagattgaggaaggttgctggagagct

SEQ ID NO: 5081 - RNA, 42 nt, synthetic construct
  misc_feature 1..42: note = Description of Artificial Sequence: Synthetic oligonucleotide
  misc_feature 1..42: note = Category: MG29-1 sgRNA targeting mouse TRAC
  misc_feature 1..42: note = Description: MG29-1-mTRAC-sgRNA-B4
  source 1..42: mol_type = other RNA
taatttctactgttgtagatttgttttttttttttttgcggg

SEQ ID NO: 5082 - RNA, 42 nt, synthetic construct
  misc_feature 1..42: note = Description of Artificial Sequence: Synthetic oligonucleotide
  misc_feature 1..42: note = Category: MG29-1 sgRNA targeting mouse TRAC
  misc_feature 1..42: note = Description: MG29-1-mTRAC-sgRNA-C4
  source 1..42: mol_type = other RNA
taatttctactgttgtagattgttttttttttttttgcgggt

SEQ ID NO: 5083 - RNA, 42 nt, synthetic construct
  misc_feature 1..42: note = Description of Artificial Sequence: Synthetic oligonucleotide
  misc_feature 1..42: note = Category: MG29-1 sgRNA targeting mouse TRAC
  misc_feature 1..42: note = Description: MG29-1-mTRAC-sgRNA-D4
  source 1..42: mol_type = other RNA
taatttctactgttgtagatgttttttttttttttgcgggtt

SEQ ID NO: 5084 - RNA, 42 nt, synthetic construct
  misc_feature 1..42: note = Description of Artificial Sequence: Synthetic oligonucleotide
  misc_feature 1..42: note = Category: MG29-1 sgRNA targeting mouse TRAC
  misc_feature 1..42: note = Description: MG29-1-mTRAC-sgRNA-E4
  source 1..42: mol_type = other RNA
taatttctactgttgtagatttttttttttttttgcgggttt

SEQ ID NO: 5085 - RNA, 42 nt, synthetic construct
  misc_feature 1..42: note = Description of Artificial Sequence: Synthetic oligonucleotide
  misc_feature 1..42: note = Category: MG29-1 sgRNA targeting mouse TRAC
  misc_feature 1..42: note = Description: MG29-1-mTRAC-sgRNA-F4
  source 1..42: mol_type = other RNA
taatttctactgttgtagatttttttttttgcgggtttattt

SEQ ID NO: 5086 - RNA, 42 nt, synthetic construct
  misc_feature 1..42: note = Description of Artificial Sequence: Synthetic oligonucleotide
  misc_feature 1..42: note = Category: MG29-1 sgRNA targeting mouse TRAC
  misc_feature 1..42: note = Description: MG29-1-mTRAC-sgRNA-G4
  source 1..42: mol_type = other RNA
taatttctactgttgtagattttttttttgcgggtttatttt

SEQ ID NO: 5087 - RNA, 42 nt, synthetic construct
  misc_feature 1..42: note = Description of Artificial Sequence: Synthetic oligonucleotide
  misc_feature 1..42: note = Category: MG29-1 sgRNA targeting mouse TRAC
  misc_feature 1..42: note = Description: MG29-1-mTRAC-sgRNA-H4
  source 1..42: mol_type = other RNA
taatttctactgttgtagatttttttttgcgggtttattttt

SEQ ID NO: 5088 - RNA, 42 nt, synthetic construct
  misc_feature 1..42: note = Description of Artificial Sequence: Synthetic oligonucleotide
  misc_feature 1..42: note = Category: MG29-1 sgRNA targeting mouse TRAC
  misc_feature 1..42: note = Description: MG29-1-mTRAC-sgRNA-A5
  source 1..42: mol_type = other RNA
taatttctactgttgtagattttttttgcgggtttatttttt

SEQ ID NO: 5089 - RNA, 42 nt, synthetic construct
  misc_feature 1..42: note = Description of Artificial Sequence: Synthetic oligonucleotide
  misc_feature 1..42: note = Category: MG29-1 sgRNA targeting mouse TRAC
  misc_feature 1..42: note = Description: MG29-1-mTRAC-sgRNA-B5
  source 1..42: mol_type = other RNA
taatttctactgttgtagatttttttgcgggtttattttttt

SEQ ID NO: 5090 - RNA, 42 nt, synthetic construct
  misc_feature 1..42: note = Description of Artificial Sequence: Synthetic oligonucleotide
  misc_feature 1..42: note = Category: MG29-1 sgRNA targeting mouse TRAC
  misc_feature 1..42: note = Description: MG29-1-mTRAC-sgRNA-C5
  source 1..42: mol_type = other RNA
taatttctactgttgtagattttttgcgggtttattttttta

SEQ ID NO: 5091 - RNA, 42 nt, synthetic construct
  misc_feature 1..42: note = Description of Artificial Sequence: Synthetic oligonucleotide
  misc_feature 1..42: note = Category: MG29-1 sgRNA targeting mouse TRAC
  misc_feature 1..42: note = Description: MG29-1-mTRAC-sgRNA-D5
  source 1..42: mol_type = other RNA
taatttctactgttgtagatttttgcgggtttatttttttaa

SEQ ID NO: 5092 - RNA, 42 nt, synthetic construct
  misc_feature 1..42: note = Description of Artificial Sequence: Synthetic oligonucleotide
  misc_feature 1..42: note = Category: MG29-1 sgRNA targeting mouse TRAC
  misc_feature 1..42: note = Description: MG29-1-mTRAC-sgRNA-E5
  source 1..42: mol_type = other RNA
taatttctactgttgtagattttgcgggtttatttttttaag

SEQ ID NO: 5093 - RNA, 42 nt, synthetic construct
  misc_feature 1..42: note = Description of Artificial Sequence: Synthetic oligonucleotide
  misc_feature 1..42: note = Category: MG29-1 sgRNA targeting mouse TRAC
  misc_feature 1..42: note = Description: MG29-1-mTRAC-sgRNA-F5
  source 1..42: mol_type = other RNA
taatttctactgttgtagatttgcgggtttatttttttaagc

SEQ ID NO: 5094 - RNA, 42 nt, synthetic construct
  misc_feature 1..42: note = Description of Artificial Sequence: Synthetic oligonucleotide
  misc_feature 1..42: note = Category: MG29-1 sgRNA targeting mouse TRAC
  misc_feature 1..42: note = Description: MG29-1-mTRAC-sgRNA-G5
  source 1..42: mol_type = other RNA
taatttctactgttgtagattgcgggtttatttttttaagca

SEQ ID NO: 5095 - RNA, 42 nt, synthetic construct
  misc_feature 1..42: note = Description of Artificial Sequence: Synthetic oligonucleotide
  misc_feature 1..42: note = Category: MG29-1 sgRNA targeting mouse TRAC
  misc_feature 1..42: note = Description: MG29-1-mTRAC-sgRNA-H5
  source 1..42: mol_type = other RNA
taatttctactgttgtagatgcgggtttatttttttaagcat

SEQ ID NO: 5096 - RNA, 42 nt, synthetic construct
  misc_feature 1..42: note = Description of Artificial Sequence: Synthetic oligonucleotide
  misc_feature 1..42: note = Category: MG29-1 sgRNA targeting mouse TRAC
  misc_feature 1..42: note = Description: MG29-1-mTRAC-sgRNA-A6
  source 1..42: mol_type = other RNA
taatttctactgttgtagatcgggtttatttttttaagcatc

SEQ ID NO: 5097 - RNA, 42 nt, synthetic construct
  misc_feature 1..42: note = Description of Artificial Sequence: Synthetic oligonucleotide
  misc_feature 1..42: note = Category: MG29-1 sgRNA targeting mouse TRAC
  misc_feature 1..42: note = Description: MG29-1-mTRAC-sgRNA-B6
  source 1..42: mol_type = other RNA
taatttctactgttgtagattttttttaagcatccatgaaga

SEQ ID NO: 5098 - RNA, 42 nt, synthetic construct
  misc_feature 1..42: note = Description of Artificial Sequence: Synthetic oligonucleotide
  misc_feature 1..42: note = Category: MG29-1 sgRNA targeting mouse TRAC
  misc_feature 1..42: note = Description: MG29-1-mTRAC-sgRNA-C6
  source 1..42: mol_type = other RNA
taatttctactgttgtagattttaagcatccatgaagaaatg

SEQ ID NO: 5099 - RNA, 42 nt, synthetic construct
  misc_feature 1..42: note = Description of Artificial Sequence: Synthetic oligonucleotide
  misc_feature 1..42: note = Category: MG29-1 sgRNA targeting mouse TRAC
  misc_feature 1..42: note = Description: MG29-1-mTRAC-sgRNA-D6
  source 1..42: mol_type = other RNA
taatttctactgttgtagatttaagcatccatgaagaaatgc

SEQ ID NO: 5100 - RNA, 42 nt, synthetic construct
  misc_feature 1..42: note = Description of Artificial Sequence: Synthetic oligonucleotide
  misc_feature 1..42: note = Category: MG29-1 sgRNA targeting mouse TRAC
  misc_feature 1..42: note = Description: MG29-1-mTRAC-sgRNA-E6
  source 1..42: mol_type = other RNA
taatttctactgttgtagattaagcatccatgaagaaatgca

SEQ ID NO: 5101 - RNA, 42 nt, synthetic construct
  misc_feature 1..42: note = Description of Artificial Sequence: Synthetic oligonucleotide
  misc_feature 1..42: note = Category: MG29-1 sgRNA targeting mouse TRAC
  misc_feature 1..42: note = Description: MG29-1-mTRAC-sgRNA-F6
  source 1..42: mol_type = other RNA
taatttctactgttgtagataagcatccatgaagaaatgcat

SEQ ID NO: 5102 - RNA, 42 nt, synthetic construct
  misc_feature 1..42: note = Description of Artificial Sequence: Synthetic oligonucleotide
  misc_feature 1..42: note = Category: MG29-1 sgRNA targeting mouse TRAC
  misc_feature 1..42: note = Description: MG29-1-mTRAC-sgRNA-G6
  source 1..42: mol_type = other RNA
taatttctactgttgtagatagcatccatgaagaaatgcata

SEQ ID NO: 5103 - RNA, 42 nt, synthetic construct
  misc_feature 1..42: note = Description of Artificial Sequence: Synthetic oligonucleotide
  misc_feature 1..42: note = Category: MG29-1 sgRNA targeting mouse TRAC
  misc_feature 1..42: note = Description: MG29-1-mTRAC-sgRNA-H6
  source 1..42: mol_type = other RNA
taatttctactgttgtagatatcaaggtgtagaaattatctc

SEQ ID NO: 5104 - RNA, 42 nt, synthetic construct
  misc_feature 1..42: note = Description of Artificial Sequence: Synthetic oligonucleotide
  misc_feature 1..42: note = Category: MG29-1 sgRNA targeting mouse TRAC
  misc_feature 1..42: note = Description: MG29-1-mTRAC-sgRNA-A7
  source 1..42: mol_type = other RNA
taatttctactgttgtagatggtttttctgaatcacctttaa

SEQ ID NO: 5105 - RNA, 42 nt, synthetic construct
  misc_feature 1..42: note = Description of Artificial Sequence: Synthetic oligonucleotide
  misc_feature 1..42: note = Category: MG29-1 sgRNA targeting mouse TRAC
  misc_feature 1..42: note = Description: MG29-1-mTRAC-sgRNA-B7
  source 1..42: mol_type = other RNA
taatttctactgttgtagatgtttttctgaatcacctttaat

SEQ ID NO: 5106 - RNA, 42 nt, synthetic construct
  misc_feature 1..42: note = Description of Artificial Sequence: Synthetic oligonucleotide
  misc_feature 1..42: note = Category: MG29-1 sgRNA targeting mouse TRAC
  misc_feature 1..42: note = Description: MG29-1-mTRAC-sgRNA-C7
  source 1..42: mol_type = other RNA
taatttctactgttgtagattctgaatcacctttaatgatgt

SEQ ID NO: 5107 - RNA, 42 nt, synthetic construct
  misc_feature 1..42: note = Description of Artificial Sequence: Synthetic oligonucleotide
  misc_feature 1..42: note = Category: MG29-1 sgRNA targeting mouse TRAC
  misc_feature 1..42: note = Description: MG29-1-mTRAC-sgRNA-D7
  source 1..42: mol_type = other RNA
taatttctactgttgtagatctgaatcacctttaatgatgtc

SEQ ID NO: 5108 - RNA, 42 nt, synthetic construct
  misc_feature 1..42: note = Description of Artificial Sequence: Synthetic oligonucleotide
  misc_feature 1..42: note = Category: MG29-1 sgRNA targeting mouse TRAC
  misc_feature 1..42: note = Description: MG29-1-mTRAC-sgRNA-E7
  source 1..42: mol_type = other RNA
taatttctactgttgtagattgaatcacctttaatgatgtca

SEQ ID NO: 5109 - RNA, 42 nt, synthetic construct
  misc_feature 1..42: note = Description of Artificial Sequence: Synthetic oligonucleotide
  misc_feature 1..42: note = Category: MG29-1 sgRNA targeting mouse TRAC
  misc_feature 1..42: note = Description: MG29-1-mTRAC-sgRNA-F7
  source 1..42: mol_type = other RNA
taatttctactgttgtagatatgatgtcatggacagcagaat

SEQ ID NO: 5110 - RNA, 42 nt, synthetic construct
  misc_feature 1..42: note = Description of Artificial Sequence: Synthetic oligonucleotide
  misc_feature 1..42: note = Category: MG29-1 sgRNA targeting mouse TRAC
  misc_feature 1..42: note = Description: MG29-1-mTRAC-sgRNA-G7
  source 1..42: mol_type = other RNA
taatttctactgttgtagattacaccttgatgaaagagtaat

SEQ ID NO: 5111 - RNA, 42 nt, synthetic construct
  misc_feature 1..42: note = Description of Artificial Sequence: Synthetic oligonucleotide
  misc_feature 1..42: note = Category: MG29-1 sgRNA targeting mouse TRAC
  misc_feature 1..42: note = Description: MG29-1-mTRAC-sgRNA-H7
  source 1..42: mol_type = other RNA
taatttctactgttgtagatttcatggatgcttaaaaaaata

SEQ ID NO: 5112 - RNA, 42 nt, synthetic construct
  misc_feature 1..42: note = Description of Artificial Sequence: Synthetic oligonucleotide
  misc_feature 1..42: note = Category: MG29-1 sgRNA targeting mouse TRAC
  misc_feature 1..42: note = Description: MG29-1-mTRAC-sgRNA-A8
  source 1..42: mol_type = other RNA
taatttctactgttgtagatttttacaacattctccaagaga

SEQ ID NO: 5113 - RNA, 42 nt, synthetic construct
  misc_feature 1..42: note = Description of Artificial Sequence: Synthetic oligonucleotide
  misc_feature 1..42: note = Category: MG29-1 sgRNA targeting mouse TRAC
  misc_feature 1..42: note = Description: MG29-1-mTRAC-sgRNA-B8
  source 1..42: mol_type = other RNA
taatttctactgttgtagattttacaacattctccaagagat

SEQ ID NO: 5114 - RNA, 42 nt, synthetic construct
  misc_feature 1..42: note = Description of Artificial Sequence: Synthetic oligonucleotide
  misc_feature 1..42: note = Category: MG29-1 sgRNA targeting mouse TRAC
  misc_feature 1..42: note = Description: MG29-1-mTRAC-sgRNA-C8
  source 1..42: mol_type = other RNA
taatttctactgttgtagatttacaacattctccaagagatt

SEQ ID NO: 5115 - RNA, 42 nt, synthetic construct
  misc_feature 1..42: note = Description of Artificial Sequence: Synthetic oligonucleotide
  misc_feature 1..42: note = Category: MG29-1 sgRNA targeting mouse TRAC
  misc_feature 1..42: note = Description: MG29-1-mTRAC-sgRNA-D8
  source 1..42: mol_type = other RNA
taatttctactgttgtagattacaacattctccaagagattt

SEQ ID NO: 5116 - RNA, 42 nt, synthetic construct
  misc_feature 1..42: note = Description of Artificial Sequence: Synthetic oligonucleotide
  misc_feature 1..42: note = Category: MG29-1 sgRNA targeting mouse TRAC
  misc_feature 1..42: note = Description: MG29-1-mTRAC-sgRNA-E8
  source 1..42: mol_type = other RNA
taatttctactgttgtagatacaacattctccaagagatttt

SEQ ID NO: 5117 - RNA, 42 nt, synthetic construct
  misc_feature 1..42: note = Description of Artificial Sequence: Synthetic oligonucleotide
  misc_feature 1..42: note = Category: MG29-1 sgRNA targeting mouse TRAC
  misc_feature 1..42: note = Description: MG29-1-mTRAC-sgRNA-F8
  source 1..42: mol_type = other RNA
taatttctactgttgtagatcaacattctccaagagatttta

SEQ ID NO: 5118 - RNA, 42 nt, synthetic construct
  misc_feature 1..42: note = Description of Artificial Sequence: Synthetic oligonucleotide
  misc_feature 1..42: note = Category: MG29-1 sgRNA targeting mouse TRAC
  misc_feature 1..42: note = Description: MG29-1-mTRAC-sgRNA-G8
  source 1..42: mol_type = other RNA
taatttctactgttgtagatacaggggagtctgccatggggg

SEQ ID NO: 5119 - RNA, 42 nt, synthetic construct
  misc_feature 1..42: note = Description of Artificial Sequence: Synthetic oligonucleotide
  misc_feature 1..42: note = Category: MG29-1 sgRNA targeting mouse TRAC
  misc_feature 1..42: note = Description: MG29-1-mTRAC-sgRNA-H8
  source 1..42: mol_type = other RNA
taatttctactgttgtagatcaggggagtctgccatggggga

SEQ ID NO: 5120 - RNA, 42 nt, synthetic construct
  misc_feature 1..42: note = Description of Artificial Sequence: Synthetic oligonucleotide
  misc_feature 1..42: note = Category: MG29-1 sgRNA targeting mouse TRAC
  misc_feature 1..42: note = Description: MG29-1-mTRAC-sgRNA-A9
  source 1..42: mol_type = other RNA
taatttctactgttgtagatttgtgaatggtcagcagcagtg

SEQ ID NO: 5121 - RNA, 42 nt, synthetic construct
  misc_feature 1..42: note = Description of Artificial Sequence: Synthetic oligonucleotide
  misc_feature 1..42: note = Category: MG29-1 sgRNA targeting mouse TRAC
  misc_feature 1..42: note = Description: MG29-1-mTRAC-sgRNA-B9
  source 1..42: mol_type = other RNA
taatttctactgttgtagattgtgaatggtcagcagcagtga

SEQ ID NO: 5122 - RNA, 42 nt, synthetic construct
  misc_feature 1..42: note = Description of Artificial Sequence: Synthetic oligonucleotide
  misc_feature 1..42: note = Category: MG29-1 sgRNA targeting mouse TRAC
  misc_feature 1..42: note = Description: MG29-1-mTRAC-sgRNA-C9
  source 1..42: mol_type = other RNA
taatttctactgttgtagatgtgaatggtcagcagcagtgag

SEQ ID NO: 5123 - RNA, 42 nt, synthetic construct
  misc_feature 1..42: note = Description of Artificial Sequence: Synthetic oligonucleotide
  misc_feature 1..42: note = Category: MG29-1 sgRNA targeting mouse TRAC
  misc_feature 1..42: note = Description: MG29-1-mTRAC-sgRNA-D9
  source 1..42: mol_type = other RNA
taatttctactgttgtagattgaatggtcagcagcagtgagg

SEQ ID NO: 5124 - RNA, 42 nt, synthetic construct
  misc_feature 1..42: note = Description of Artificial Sequence: Synthetic oligonucleotide
  misc_feature 1..42: note = Category: MG29-1 sgRNA targeting mouse TRAC
  misc_feature 1..42: note = Description: MG29-1-mTRAC-sgRNA-E9
  source 1..42: mol_type = other RNA
taatttctactgttgtagatggcttgaagaaggagcggaggg

SEQ ID NO: 5125 - RNA, 42 nt, synthetic construct
  misc_feature 1..42: note = Description of Artificial Sequence: Synthetic oligonucleotide
  misc_feature 1..42: note = Category: MG29-1 sgRNA targeting mouse TRAC
  misc_feature 1..42: note = Description: MG29-1-mTRAC-sgRNA-F9
  source 1..42: mol_type = other RNA
taatttctactgttgtagatgcttgaagaaggagcggagggg

SEQ ID NO: 5126 - DNA, 22 bp, unidentified
  misc_feature 1..22: note = Description of Unknown: MG29-1-mTRAC-target site-A1 sequence
  misc_feature 1..22: note = Category: DNA sequence of TRAC target site
  source 1..22: mol_type = unassigned DNA
actcccaaatcaatgtgccgaa

SEQ ID NO: 5127 - DNA, 22 bp, unidentified
  misc_feature 1..22: note = Description of Unknown: MG29-1-mTRAC-target site-B1 sequence
  misc_feature 1..22: note = Category: DNA sequence of TRAC target site
  source 1..22: mol_type = unassigned DNA
aagatatcttggcaggtgaagc

SEQ ID NO: 5128 - DNA, 22 bp, unidentified
  misc_feature 1..22: note = Description of Unknown: MG29-1-mTRAC-target site-C1 sequence
  misc_feature 1..22: note = Category: DNA sequence of TRAC target site
  source 1..22: mol_type = unassigned DNA
atgtccagcacagttttgtcag

SEQ ID NO: 5129 - DNA, 22 bp, unidentified
  misc_feature 1..22: note = Description of Unknown: MG29-1-mTRAC-target site-D1 sequence
  misc_feature 1..22: note = Category: DNA sequence of TRAC target site
  source 1..22: mol_type = unassigned DNA
gtcagtgatgaacgttccagat

SEQ ID NO: 5130 - DNA, 22 bp, unidentified
  misc_feature 1..22: note = Description of Unknown: MG29-1-mTRAC-target site-E1 sequence
  misc_feature 1..22: note = Category: DNA sequence of TRAC target site
  source 1..22: mol_type = unassigned DNA
tcagtgatgaacgttccagatt

SEQ ID NO: 5131 - DNA, 22 bp, unidentified
  misc_feature 1..22: note = Description of Unknown: MG29-1-mTRAC-target site-F1 sequence
  misc_feature 1..22: note = Category: DNA sequence of TRAC target site
  source 1..22: mol_type = unassigned DNA
cggcacattgatttgggagtca

SEQ ID NO: 5132 - DNA, 22 bp, unidentified
  misc_feature 1..22: note = Description of Unknown: MG29-1-mTRAC-target site-G1 sequence
  misc_feature 1..22: note = Category: DNA sequence of TRAC target site
  source 1..22: mol_type = unassigned DNA
ggcacattgatttgggagtcaa

SEQ ID NO: 5133 - DNA, 22 bp, unidentified
  misc_feature 1..22: note = Description of Unknown: MG29-1-mTRAC-target site-H1 sequence
  misc_feature 1..22: note = Category: DNA sequence of TRAC target site
  source 1..22: mol_type = unassigned DNA
ggagtcaaagtcggtgaacagg

SEQ ID NO: 5134 - DNA, 22 bp, unidentified
  misc_feature 1..22: note = Description of Unknown: MG29-1-mTRAC-target site-A2 sequence
  misc_feature 1..22: note = Category: DNA sequence of TRAC target site
  source 1..22: mol_type = unassigned DNA
aactggtacacagcaggttctg

SEQ ID NO: 5135 - DNA, 22 bp, unidentified
  misc_feature 1..22: note = Description of Unknown: MG29-1-mTRAC-target site-B2 sequence
  misc_feature 1..22: note = Category: DNA sequence of TRAC target site
  source 1..22: mol_type = unassigned DNA
actggtacacagcaggttctgg

SEQ ID NO: 5136 - DNA, 22 bp, unidentified
  misc_feature 1..22: note = Description of Unknown: MG29-1-mTRAC-target site-C2 sequence
  misc_feature 1..22: note = Category: DNA sequence of TRAC target site
  source 1..22: mol_type = unassigned DNA
ttttcccttttagacgttccct

SEQ ID NO: 5137 - DNA, 22 bp, unidentified
  misc_feature 1..22: note = Description of Unknown: MG29-1-mTRAC-target site-D2 sequence
  misc_feature 1..22: note = Category: DNA sequence of TRAC target site
  source 1..22: mol_type = unassigned DNA
cccttttagacgttccctgtga

SEQ ID NO: 5138 - DNA, 22 bp, unidentified
  misc_feature 1..22: note = Description of Unknown: MG29-1-mTRAC-target site-E2 sequence
  misc_feature 1..22: note = Category: DNA sequence of TRAC target site
  source 1..22: mol_type = unassigned DNA
ccttttagacgttccctgtgat

SEQ ID NO: 5139 - DNA, 22 bp, unidentified
  misc_feature 1..22: note = Description of Unknown: MG29-1-mTRAC-target site-F2 sequence
  misc_feature 1..22: note = Category: DNA sequence of TRAC target site
  source 1..22: mol_type = unassigned DNA
agacgttccctgtgatgccacg

SEQ ID NO: 5140 - DNA, 22 bp, unidentified
  misc_feature 1..22: note = Description of Unknown: MG29-1-mTRAC-target site-G2 sequence
  misc_feature 1..22: note = Category: DNA sequence of TRAC target site
  source 1..22: mol_type = unassigned DNA
gacgttccctgtgatgccacgt

SEQ ID NO: 5141 - DNA, 22 bp, unidentified
  misc_feature 1..22: note = Description of Unknown: MG29-1-mTRAC-target site-H2 sequence
  misc_feature 1..22: note = Category: DNA sequence of TRAC target site
  source 1..22: mol_type = unassigned DNA
aaagcttttctcagtcaacgtg

SEQ ID NO: 5142 - DNA, 22 bp, unidentified
  misc_feature 1..22: note = Description of Unknown: MG29-1-mTRAC-target site-A3 sequence
  misc_feature 1..22: note = Category: DNA sequence of TRAC target site
  source 1..22: mol_type = unassigned DNA
ctcagtcaacgtggcatcacag

SEQ ID NO: 5143 - DNA, 22 bp, unidentified
  misc_feature 1..22: note = Description of Unknown: MG29-1-mTRAC-target site-B3 sequence
  misc_feature 1..22: note = Category: DNA sequence of TRAC target site
  source 1..22: mol_type = unassigned DNA
tcagtcaacgtggcatcacagg

SEQ ID NO: 5144 - DNA, 22 bp, unidentified
  misc_feature 1..22: note = Description of Unknown: MG29-1-mTRAC-target site-C3 sequence
  misc_feature 1..22: note = Category: DNA sequence of TRAC target site
  source 1..22: mol_type = unassigned DNA
acagatatgaacctaaactttc

SEQ ID NO: 5145 - DNA, 22 bp, unidentified
  misc_feature 1..22: note = Description of Unknown: MG29-1-mTRAC-target site-D3 sequence
  misc_feature 1..22: note = Category: DNA sequence of TRAC target site
  source 1..22: mol_type = unassigned DNA
cagatatgaacctaaactttca

SEQ ID NO: 5146 - DNA, 22 bp, unidentified
  misc_feature 1..22: note = Description of Unknown: MG29-1-mTRAC-target site-E3 sequence
  misc_feature 1..22: note = Category: DNA sequence of TRAC target site
  source 1..22: mol_type = unassigned DNA
aaaacctgtcagttatgggact

SEQ ID NO: 5147 - DNA, 22 bp, unidentified
  misc_feature 1..22: note = Description of Unknown: MG29-1-mTRAC-target site-F3 sequence
  misc_feature 1..22: note = Category: DNA sequence of TRAC target site
  source 1..22: mol_type = unassigned DNA
acctgctcatgacgctgaggct

SEQ ID NO: 5148 - DNA, 22 bp, unidentified
  misc_feature 1..22: note = Description of Unknown: MG29-1-mTRAC-target site-G3 sequence
  misc_feature 1..22: note = Category: DNA sequence of TRAC target site
  source 1..22: mol_type = unassigned DNA
atgccttcttacctcaactgga

SEQ ID NO: 5149 - DNA, 22 bp, unidentified
  misc_feature 1..22: note = Description of Unknown: MG29-1-mTRAC-target site-H3 sequence
  misc_feature 1..22: note = Category: DNA sequence of TRAC target site
  source 1..22: mol_type = unassigned DNA
agcaggaggattcggagtccca

SEQ ID NO: 5150 - DNA, 22 bp, unidentified
  misc_feature 1..22: note = Description of Unknown: MG29-1-mTRAC-target site-A4 sequence
  misc_feature 1..22: note = Category: DNA sequence of TRAC target site
  source 1..22: mol_type = unassigned DNA
tgaggaaggttgctggagagct

SEQ ID NO: 5151 - DNA, 22 bp, unidentified
  misc_feature 1..22: note = Description of Unknown: MG29-1-mTRAC-target site-B4 sequence
  misc_feature 1..22: note = Category: DNA sequence of TRAC target site
  source 1..22: mol_type = unassigned DNA
ttgttttttttttttttgcggg

SEQ ID NO: 5152 - DNA, 22 bp, unidentified
  misc_feature 1..22: note = Description of Unknown: MG29-1-mTRAC-target site-C4 sequence
  misc_feature 1..22: note = Category: DNA sequence of TRAC target site
  source 1..22: mol_type = unassigned DNA
tgttttttttttttttgcgggt

SEQ ID NO: 5153 - DNA, 22 bp, unidentified
  misc_feature 1..22: note = Description of Unknown: MG29-1-mTRAC-target site-D4 sequence
  misc_feature 1..22: note = Category: DNA sequence of TRAC target site
  source 1..22: mol_type = unassigned DNA
gttttttttttttttgcgggtt

SEQ ID NO: 5154 - DNA, 22 bp, unidentified
  misc_feature 1..22: note = Description of Unknown: MG29-1-mTRAC-target site-E4 sequence
  misc_feature 1..22: note = Category: DNA sequence of TRAC target site
  source 1..22: mol_type = unassigned DNA
ttttttttttttttgcgggttt

SEQ ID NO: 5155 - DNA, 22 bp, unidentified
  misc_feature 1..22: note = Description of Unknown: MG29-1-mTRAC-target site-F4 sequence
  misc_feature 1..22: note = Category: DNA sequence of TRAC target site
  source 1..22: mol_type = unassigned DNA
ttttttttttgcgggtttattt

SEQ ID NO: 5156 - DNA, 22 bp, unidentified
  misc_feature 1..22: note = Description of Unknown: MG29-1-mTRAC-target site-G4 sequence
  misc_feature 1..22: note = Category: DNA sequence of TRAC target site
  source 1..22: mol_type = unassigned DNA
tttttttttgcgggtttatttt

SEQ ID NO: 5157 - DNA, 22 bp, unidentified
  misc_feature 1..22: note = Description of Unknown: MG29-1-mTRAC-target site-H4 sequence
  misc_feature 1..22: note = Category: DNA sequence of TRAC target site
  source 1..22: mol_type = unassigned DNA
ttttttttgcgggtttattttt

SEQ ID NO: 5158 - DNA, 22 bp, unidentified
  misc_feature 1..22: note = Description of Unknown: MG29-1-mTRAC-target site-A5 sequence
  misc_feature 1..22: note = Category: DNA sequence of TRAC target site
  source 1..22: mol_type = unassigned DNA
tttttttgcgggtttatttttt

SEQ ID NO: 5159 - DNA, 22 bp, unidentified
  misc_feature 1..22: note = Description of Unknown: MG29-1-mTRAC-target site-B5 sequence
  misc_feature 1..22: note = Category: DNA sequence of TRAC target site
  source 1..22: mol_type = unassigned DNA
ttttttgcgggtttattttttt

SEQ ID NO: 5160 - DNA, 22 bp, unidentified
  misc_feature 1..22: note = Description of Unknown: MG29-1-mTRAC-target site-C5 sequence
  misc_feature 1..22: note = Category: DNA sequence of TRAC target site
  source 1..22: mol_type = unassigned DNA
tttttgcgggtttattttttta

SEQ ID NO: 5161 - DNA, 22 bp, unidentified
  misc_feature 1..22: note = Description of Unknown: MG29-1-mTRAC-target site-D5 sequence
  misc_feature 1..22: note = Category: DNA sequence of TRAC target site
  source 1..22: mol_type = unassigned DNA
ttttgcgggtttatttttttaa

SEQ ID NO: 5162 - DNA, 22 bp, unidentified
  misc_feature 1..22: note = Description of Unknown: MG29-1-mTRAC-target site-E5 sequence
  misc_feature 1..22: note = Category: DNA sequence of TRAC target site
  source 1..22: mol_type = unassigned DNA
tttgcgggtttatttttttaag

SEQ ID NO: 5163 - DNA, 22 bp, unidentified
  misc_feature 1..22: note = Description of Unknown: MG29-1-mTRAC-target site-F5 sequence
  misc_feature 1..22: note = Category: DNA sequence of TRAC target site
  source 1..22: mol_type = unassigned DNA
ttgcgggtttatttttttaagc

SEQ ID NO: 5164 - DNA, 22 bp, unidentified
  misc_feature 1..22: note = Description of Unknown: MG29-1-mTRAC-target site-G5 sequence
  misc_feature 1..22: note = Category: DNA sequence of TRAC target site
  source 1..22: mol_type = unassigned DNA
tgcgggtttatttttttaagca

SEQ ID NO: 5165 - DNA, 22 bp, unidentified
  misc_feature 1..22: note = Description of Unknown: MG29-1-mTRAC-target site-H5 sequence
  misc_feature 1..22: note = Category: DNA sequence of TRAC target site
  source 1..22: mol_type = unassigned DNA
gcgggtttatttttttaagcat

SEQ ID NO: 5166 - DNA, 22 bp, unidentified
  misc_feature 1..22: note = Description of Unknown: MG29-1-mTRAC-target site-A6 sequence
  misc_feature 1..22: note = Category: DNA sequence of TRAC target site
  source 1..22: mol_type = unassigned DNA
cgggtttatttttttaagcatc

SEQ ID NO: 5167 - DNA, 22 bp, unidentified
  misc_feature 1..22: note = Description of Unknown: MG29-1-mTRAC-target site-B6 sequence
  misc_feature 1..22: note = Category: DNA sequence of TRAC target site
  source 1..22: mol_type = unassigned DNA
tttttttaagcatccatgaaga

SEQ ID NO: 5168 - DNA, 22 bp, unidentified
  misc_feature 1..22: note = Description of Unknown: MG29-1-mTRAC-target site-C6 sequence
  misc_feature 1..22: note = Category: DNA sequence of TRAC target site
  source 1..22: mol_type = unassigned DNA
tttaagcatccatgaagaaatg

SEQ ID NO: 5169 - DNA, 22 bp, unidentified
  misc_feature 1..22: note = Description of Unknown: MG29-1-mTRAC-target site-D6 sequence
  misc_feature 1..22: note = Category: DNA sequence of TRAC target site
  source 1..22: mol_type = unassigned DNA
ttaagcatccatgaagaaatgc

SEQ ID NO: 5170 - DNA, 22 bp, unidentified
  misc_feature 1..22: note = Description of Unknown: MG29-1-mTRAC-target site-E6 sequence
  misc_feature 1..22: note = Category: DNA sequence of TRAC target site
  source 1..22: mol_type = unassigned DNA
taagcatccatgaagaaatgca

SEQ ID NO: 5171 - DNA, 22 bp, unidentified
  misc_feature 1..22: note = Description of Unknown: MG29-1-mTRAC-target site-F6 sequence
  misc_feature 1..22: note = Category: DNA sequence of TRAC target site
  source 1..22: mol_type = unassigned DNA
aagcatccatgaagaaatgcat

SEQ ID NO: 5172 - DNA, 22 bp, unidentified
  misc_feature 1..22: note = Description of Unknown: MG29-1-mTRAC-target site-G6 sequence
  misc_feature 1..22: note = Category: DNA sequence of TRAC target site
  source 1..22: mol_type = unassigned DNA
agcatccatgaagaaatgcata

SEQ ID NO: 5173 - DNA, 22 bp, unidentified
  misc_feature 1..22: note = Description of Unknown: MG29-1-mTRAC-target site-H6 sequence
  misc_feature 1..22: note = Category: DNA sequence of TRAC target site
  source 1..22: mol_type = unassigned DNA
atcaaggtgtagaaattatctc

SEQ ID NO: 5174 - DNA, 22 bp, unidentified
  misc_feature 1..22: note = Description of Unknown: MG29-1-mTRAC-target site-A7 sequence
  misc_feature 1..22: note = Category: DNA sequence of TRAC target site
  source 1..22: mol_type = unassigned DNA
ggtttttctgaatcacctttaa

SEQ ID NO: 5175 - DNA, 22 bp, unidentified
  misc_feature 1..22: note = Description of Unknown: MG29-1-mTRAC-target site-B7 sequence
  misc_feature 1..22: note = Category: DNA sequence of TRAC target site
  source 1..22: mol_type = unassigned DNA
gtttttctgaatcacctttaat

SEQ ID NO: 5176 - DNA, 22 bp, unidentified
  misc_feature 1..22: note = Description of Unknown: MG29-1-mTRAC-target site-C7 sequence
  misc_feature 1..22: note = Category: DNA sequence of TRAC target site
  source 1..22: mol_type = unassigned DNA
tctgaatcacctttaatgatgt

SEQ ID NO: 5177 - DNA, 22 bp, unidentified
  misc_feature 1..22: note = Description of Unknown: MG29-1-mTRAC-target site-D7 sequence
  misc_feature 1..22: note = Category: DNA sequence of TRAC target site
  source 1..22: mol_type = unassigned DNA
ctgaatcacctttaatgatgtc

SEQ ID NO: 5178 - DNA, 22 bp, unidentified
  misc_feature 1..22: note = Description of Unknown: MG29-1-mTRAC-target site-E7 sequence
  misc_feature 1..22: note = Category: DNA sequence of TRAC target site
  source 1..22: mol_type = unassigned DNA
tgaatcacctttaatgatgtca

SEQ ID NO: 5179 - DNA, 22 bp, unidentified
  misc_feature 1..22: note = Description of Unknown: MG29-1-mTRAC-target site-F7 sequence
  misc_feature 1..22: note = Category: DNA sequence of TRAC target site
  source 1..22: mol_type = unassigned DNA
atgatgtcatggacagcagaat

SEQ ID NO: 5180 - DNA, 22 bp, unidentified
  misc_feature 1..22: note = Description of Unknown: MG29-1-mTRAC-target site-G7 sequence
  misc_feature 1..22: note = Category: DNA sequence of TRAC target site
  source 1..22: mol_type = unassigned DNA
tacaccttgatgaaagagtaat

SEQ ID NO: 5181 - DNA, 22 bp, unidentified
  misc_feature 1..22: note = Description of Unknown: MG29-1-mTRAC-target site-H7 sequence
  misc_feature 1..22: note = Category: DNA sequence of TRAC target site
  source 1..22: mol_type = unassigned DNA
ttcatggatgcttaaaaaaata

SEQ ID NO: 5182 - DNA, 22 bp, unidentified
  misc_feature 1..22: note = Description of Unknown: MG29-1-mTRAC-target site-A8 sequence
  misc_feature 1..22: note = Category: DNA sequence of TRAC target site
  source 1..22: mol_type = unassigned DNA
ttttacaacattctccaagaga

SEQ ID NO: 5183 - DNA, 22 bp, unidentified
  misc_feature 1..22: note = Description of Unknown: MG29-1-mTRAC-target site-B8 sequence
  misc_feature 1..22: note = Category: DNA sequence of TRAC target site
  source 1..22: mol_type = unassigned DNA
tttacaacattctccaagagat

SEQ ID NO: 5184 - DNA, 22 bp, unidentified
  misc_feature 1..22: note = Description of Unknown: MG29-1-mTRAC-target site-C8 sequence
  misc_feature 1..22: note = Category: DNA sequence of TRAC target site
  source 1..22: mol_type = unassigned DNA
ttacaacattctccaagagatt

SEQ ID NO: 5185 - DNA, 22 bp, unidentified
  misc_feature 1..22: note = Description of Unknown: MG29-1-mTRAC-target site-D8 sequence
  misc_feature 1..22: note = Category: DNA sequence of TRAC target site
  source 1..22: mol_type = unassigned DNA
tacaacattctccaagagattt

SEQ ID NO: 5186 - DNA, 22 bp, unidentified
  misc_feature 1..22: note = Description of Unknown: MG29-1-mTRAC-target site-E8 sequence
  misc_feature 1..22: note = Category: DNA sequence of TRAC target site
  source 1..22: mol_type = unassigned DNA
acaacattctccaagagatttt

SEQ ID NO: 5187 - DNA, 22 bp, unidentified
  misc_feature 1..22: note = Description of Unknown: MG29-1-mTRAC-target site-F8 sequence
  misc_feature 1..22: note = Category: DNA sequence of TRAC target site
  source 1..22: mol_type = unassigned DNA
caacattctccaagagatttta

SEQ ID NO: 5188 - DNA, 22 bp, unidentified
  misc_feature 1..22: note = Description of Unknown: MG29-1-mTRAC-target site-G8 sequence
  misc_feature 1..22: note = Category: DNA sequence of TRAC target site
  source 1..22: mol_type = unassigned DNA
acaggggagtctgccatggggg

SEQ ID NO: 5189 - DNA, 22 bp, unidentified
  misc_feature 1..22: note = Description of Unknown: MG29-1-mTRAC-target site-H8 sequence
  misc_feature 1..22: note = Category: DNA sequence of TRAC target site
  source 1..22: mol_type = unassigned DNA
caggggagtctgccatggggga

SEQ ID NO: 5190 - DNA, 22 bp, unidentified
  misc_feature 1..22: note = Description of Unknown: MG29-1-mTRAC-target site-A9 sequence
  misc_feature 1..22: note = Category: DNA sequence of TRAC target site
  source 1..22: mol_type = unassigned DNA
ttgtgaatggtcagcagcagtg

SEQ ID NO: 5191 - DNA, 22 bp, unidentified
  misc_feature 1..22: note = Description of Unknown: MG29-1-mTRAC-target site-B9 sequence
  misc_feature 1..22: note = Category: DNA sequence of TRAC target site
  source 1..22: mol_type = unassigned DNA
tgtgaatggtcagcagcagtga

SEQ ID NO: 5192 - DNA, 22 bp, unidentified
  misc_feature 1..22: note = Description of Unknown: MG29-1-mTRAC-target site-C9 sequence
  misc_feature 1..22: note = Category: DNA sequence of TRAC target site
  source 1..22: mol_type = unassigned DNA
gtgaatggtcagcagcagtgag

SEQ ID NO: 5193 - DNA, 22 bp, unidentified
  misc_feature 1..22: note = Description of Unknown: MG29-1-mTRAC-target site-D9 sequence
  misc_feature 1..22: note = Category: DNA sequence of TRAC target site
  source 1..22: mol_type = unassigned DNA
tgaatggtcagcagcagtgagg

SEQ ID NO: 5194 - DNA, 22 bp, unidentified
  misc_feature 1..22: note = Description of Unknown: MG29-1-mTRAC-target site-E9 sequence
  misc_feature 1..22: note = Category: DNA sequence of TRAC target site
  source 1..22: mol_type = unassigned DNA
ggcttgaagaaggagcggaggg

SEQ ID NO: 5195 - DNA, 22 bp, unidentified
  misc_feature 1..22: note = Description of Unknown: MG29-1-mTRAC-target site-F9 sequence
  misc_feature 1..22: note = Category: DNA sequence of TRAC target site
  source 1..22: mol_type = unassigned DNA
gcttgaagaaggagcggagggg

SEQ ID NO: 5196 - RNA, 42 nt, synthetic construct
  misc_feature 1..42: note = Description of Artificial Sequence: Synthetic oligonucleotide
  misc_feature 1..42: note = Category: MG29-1 sgRNA targeting mouse TRBC1
  misc_feature 1..42: note = Description: MG29-1-mTRBC1-sgRNA-A1
  source 1..42: mol_type = other RNA
taatttctactgttgtagatctttccagaggatctgagaaat

SEQ ID NO: 5197 - RNA, 42 nt, synthetic construct
  misc_feature 1..42: note = Description of Artificial Sequence: Synthetic oligonucleotide
  misc_feature 1..42: note = Category: MG29-1 sgRNA targeting mouse TRBC1
  misc_feature 1..42: note = Description: MG29-1-mTRBC1-sgRNA-B1
  source 1..42: mol_type = other RNA
taatttctactgttgtagatcagaggatctgagaaatgtgac

SEQ ID NO: 5198 - RNA, 42 nt, synthetic construct
  misc_feature 1..42: note = Description of Artificial Sequence: Synthetic oligonucleotide
  misc_feature 1..42: note = Category: MG29-1 sgRNA targeting mouse TRBC1
  misc_feature 1..42: note = Description: MG29-1-mTRBC1-sgRNA-C1
  source 1..42: mol_type = other RNA
taatttctactgttgtagatagccatcaaaagcagagattgc

SEQ ID NO: 5199 - RNA, 42 nt, synthetic construct
  misc_feature 1..42: note = Description of Artificial Sequence: Synthetic oligonucleotide
  misc_feature 1..42: note = Category: MG29-1 sgRNA targeting mouse TRBC1
  misc_feature 1..42: note = Description: MG29-1-mTRBC1-sgRNA-D1
  source 1..42: mol_type = other RNA
taatttctactgttgtagatagaggaggacaagtggccagag

SEQ ID NO: 5200 - RNA, 42 nt, synthetic construct
  misc_feature 1..42: note = Description of Artificial Sequence: Synthetic oligonucleotide
  misc_feature 1..42: note = Category: MG29-1 sgRNA targeting mouse TRBC1
  misc_feature 1..42: note = Description: MG29-1-mTRBC1-sgRNA-E1
  source 1..42: mol_type = other RNA
taatttctactgttgtagatggtgagccctctggccacttgt

SEQ ID NO: 5201 - RNA, 42 nt, synthetic construct
  misc_feature 1..42: note = Description of Artificial Sequence: Synthetic oligonucleotide
  misc_feature 1..42: note = Category: MG29-1 sgRNA targeting mouse TRBC1
  misc_feature 1..42: note = Description: MG29-1-mTRBC1-sgRNA-F1
  source 1..42: mol_type = other RNA
taatttctactgttgtagatgtttgtttgcaatctctgcttt

SEQ ID NO: 5202 - RNA, 42 nt, synthetic construct
  misc_feature 1..42: note = Description of Artificial Sequence: Synthetic oligonucleotide
  misc_feature 1..42: note = Category: MG29-1 sgRNA targeting mouse TRBC1
  misc_feature 1..42: note = Description: MG29-1-mTRBC1-sgRNA-G1
  source 1..42: mol_type = other RNA
taatttctactgttgtagattttgtttgcaatctctgctttt

SEQ ID NO: 5203 - RNA, 42 nt, synthetic construct
  misc_feature 1..42: note = Description of Artificial Sequence: Synthetic oligonucleotide
  misc_feature 1..42: note = Category: MG29-1 sgRNA targeting mouse TRBC1
  misc_feature 1..42: note = Description: MG29-1-mTRBC1-sgRNA-H1
  source 1..42: mol_type = other RNA
taatttctactgttgtagattttgcaatctctgcttttgatg

SEQ ID NO: 5204 - RNA, 42 nt, synthetic construct
  misc_feature 1..42: note = Description of Artificial Sequence: Synthetic oligonucleotide
  misc_feature 1..42: note = Category: MG29-1 sgRNA targeting mouse TRBC1
  misc_feature 1..42: note = Description: MG29-1-mTRBC1-sgRNA-A2
  source 1..42: mol_type = other RNA
taatttctactgttgtagatcaatctctgcttttgatggctc

SEQ ID NO: 5205 - RNA, 42 nt, synthetic construct
  misc_feature 1..42: note = Description of Artificial Sequence: Synthetic oligonucleotide
  misc_feature 1..42: note = Category: MG29-1 sgRNA targeting mouse TRBC1
  misc_feature 1..42: note = Description: MG29-1-mTRBC1-sgRNA-B2
  source 1..42: mol_type = other RNA
taatttctactgttgtagatgatggctcaaacaaggagacct

SEQ ID NO: 5206 - RNA, 42 nt, synthetic construct
  misc_feature 1..42: note = Description of Artificial Sequence: Synthetic oligonucleotide
  misc_feature 1..42: note = Category: MG29-1 sgRNA targeting mouse TRBC1
  misc_feature 1..42: note = Description: MG29-1-mTRBC1-sgRNA-C2
  source 1..42: mol_type = other RNA
taatttctactgttgtagatatggctcaaacaaggagacctt

SEQ ID NO: 5207 - RNA, 42 nt, synthetic construct
  misc_feature 1..42: note = Description of Artificial Sequence: Synthetic oligonucleotide
  misc_feature 1..42: note = Category: MG29-1 sgRNA targeting mouse TRBC1
  misc_feature 1..42: note = Description: MG29-1-mTRBC1-sgRNA-D2
  source 1..42: mol_type = other RNA
taatttctactgttgtagattctcttctttcagactgtggga

SEQ ID NO: 5208 - RNA, 42 nt, synthetic construct
  misc_feature 1..42: note = Description of Artificial Sequence: Synthetic oligonucleotide
  misc_feature 1..42: note = Category: MG29-1 sgRNA targeting mouse TRBC1
  misc_feature 1..42: note = Description: MG29-1-mTRBC1-sgRNA-E2
  source 1..42: mol_type = other RNA
taatttctactgttgtagatctgtcaacagcatcctatcaac

SEQ ID NO: 5209 - RNA, 42 nt, synthetic construct
  misc_feature 1..42: note = Description of Artificial Sequence: Synthetic oligonucleotide
  misc_feature 1..42: note = Category: MG29-1 sgRNA targeting mouse TRBC1
  misc_feature 1..42: note = Description: MG29-1-mTRBC1-sgRNA-F2
  source 1..42: mol_type = other RNA
taatttctactgttgtagattgtcaacagcatcctatcaaca

SEQ ID NO: 5210 - RNA, 42 nt, synthetic construct
  misc_feature 1..42: note = Description of Artificial Sequence: Synthetic oligonucleotide
  misc_feature 1..42: note = Category: MG29-1 sgRNA targeting mouse TRBC1
  misc_feature 1..42: note = Description: MG29-1-mTRBC1-sgRNA-G2
  source 1..42: mol_type = other RNA
taatttctactgttgtagatcctagcaggatctcatagagga

SEQ ID NO: 5211 - DNA, 22 bp, unidentified
  misc_feature 1..22: note = Description of Unknown: MG29-1-mTRBC1-target site-A1 sequence
  misc_feature 1..22: note = Category: DNA sequence of TRBC1 target site
  source 1..22: mol_type = unassigned DNA
ctttccagaggatctgagaaat

SEQ ID NO: 5212 - DNA, 22 bp, unidentified
  misc_feature 1..22: note = Description of Unknown: MG29-1-mTRBC1-target site-B1 sequence
  misc_feature 1..22: note = Category: DNA sequence of TRBC1 target site
  source 1..22: mol_type = unassigned DNA
cagaggatctgagaaatgtgac

SEQ ID NO: 5213 - DNA, 22 bp, unidentified
  misc_feature 1..22: note = Description of Unknown: MG29-1-mTRBC1-target site-C1 sequence
  misc_feature 1..22: note = Category: DNA sequence of TRBC1 target site
  source 1..22: mol_type = unassigned DNA
agccatcaaaagcagagattgc

SEQ ID NO: 5214 - DNA, 22 bp, unidentified
  misc_feature 1..22: note = Description of Unknown: MG29-1-mTRBC1-target site-D1 sequence
  misc_feature 1..22: note = Category: DNA sequence of TRBC1 target site
  source 1..22: mol_type = unassigned DNA
agaggaggacaagtggccagag

SEQ ID NO: 5215 - DNA, 22 bp, unidentified
  misc_feature 1..22: note = Description of Unknown: MG29-1-mTRBC1-target site-E1 sequence
  misc_feature 1..22: note = Category: DNA sequence of TRBC1 target site
  source 1..22: mol_type = unassigned DNA
ggtgagccctctggccacttgt

SEQ ID NO: 5216 - DNA, 22 bp, unidentified
  misc_feature 1..22: note = Description of Unknown: MG29-1-mTRBC1-target site-F1 sequence
  misc_feature 1..22: note = Category: DNA sequence of TRBC1 target site
  source 1..22: mol_type = unassigned DNA
gtttgtttgcaatctctgcttt

SEQ ID NO: 5217 - DNA, 22 bp, unidentified
  misc_feature 1..22: note = Description of Unknown: MG29-1-mTRBC1-target site-G1 sequence
  misc_feature 1..22: note = Category: DNA sequence of TRBC1 target site
  source 1..22: mol_type = unassigned DNA
tttgtttgcaatctctgctttt

SEQ ID NO: 5218 - DNA, 22 bp, unidentified
  misc_feature 1..22: note = Description of Unknown: MG29-1-mTRBC1-target site-H1 sequence
  misc_feature 1..22: note = Category: DNA sequence of TRBC1 target site
  source 1..22: mol_type = unassigned DNA
tttgcaatctctgcttttgatg

SEQ ID NO: 5219 - DNA, 22 bp, unidentified
  misc_feature 1..22: note = Description of Unknown: MG29-1-mTRBC1-target site-A2 sequence
  misc_feature 1..22: note = Category: DNA sequence of TRBC1 target site
  source 1..22: mol_type = unassigned DNA
caatctctgcttttgatggctc

SEQ ID NO: 5220 - DNA, 22 bp, unidentified
  misc_feature 1..22: note = Description of Unknown: MG29-1-mTRBC1-target site-B2 sequence
  misc_feature 1..22: note = Category: DNA sequence of TRBC1 target site
  source 1..22: mol_type = unassigned DNA
gatggctcaaacaaggagacct

SEQ ID NO: 5221 - DNA, 22 bp, unidentified
  misc_feature 1..22: note = Description of Unknown: MG29-1-mTRBC1-target site-C2 sequence
  misc_feature 1..22: note = Category: DNA sequence of TRBC1 target site
  source 1..22: mol_type = unassigned DNA
atggctcaaacaaggagacctt

SEQ ID NO: 5222 - DNA, 22 bp, unidentified
  misc_feature 1..22: note = Description of Unknown: MG29-1-mTRBC1-target site-D2 sequence
  misc_feature 1..22: note = Category: DNA sequence of TRBC1 target site
  source 1..22: mol_type = unassigned DNA
tctcttctttcagactgtggga

SEQ ID NO: 5223 - DNA, 22 bp, unidentified
  misc_feature 1..22: note = Description of Unknown: MG29-1-mTRBC1-target site-E2 sequence
  misc_feature 1..22: note = Category: DNA sequence of TRBC1 target site
  source 1..22: mol_type = unassigned DNA
ctgtcaacagcatcctatcaac

SEQ ID NO: 5224 - DNA, 22 bp, unidentified
  misc_feature 1..22: note = Description of Unknown: MG29-1-mTRBC1-target site-F2 sequence
  misc_feature 1..22: note = Category: DNA sequence of TRBC1 target site
  source 1..22: mol_type = unassigned DNA
tgtcaacagcatcctatcaaca

SEQ ID NO: 5225 - DNA, 22 bp, unidentified
  misc_feature 1..22: note = Description of Unknown: MG29-1-mTRBC1-target site-G2 sequence
  misc_feature 1..22: note = Category: DNA sequence of TRBC1 target site
  source 1..22: mol_type = unassigned DNA
cctagcaggatctcatagagga

SEQ ID NO: 5226 - RNA, 42 nt, synthetic construct; identical to SEQ ID NO: 5196
  misc_feature 1..42: note = Description of Artificial Sequence: Synthetic oligonucleotide
  misc_feature 1..42: note = Category: MG29-1 sgRNA targeting mouse TRBC2
  misc_feature 1..42: note = Description: MG29-1-mTRBC2-sgRNA-A1
  source 1..42: mol_type = other RNA

SEQ ID NO: 5227 - RNA, 42 nt, synthetic construct; identical to SEQ ID NO: 5197
  misc_feature 1..42: note = Description of Artificial Sequence: Synthetic oligonucleotide
  misc_feature 1..42: note = Category: MG29-1 sgRNA targeting mouse TRBC2
  misc_feature 1..42: note = Description: MG29-1-mTRBC2-sgRNA-B1
  source 1..42: mol_type = other RNA

SEQ ID NO: 5228 - RNA, 42 nt, synthetic construct; identical to SEQ ID NO: 5198
  misc_feature 1..42: note = Description of Artificial Sequence: Synthetic oligonucleotide
  misc_feature 1..42: note = Category: MG29-1 sgRNA targeting mouse TRBC2
  misc_feature 1..42: note = Description: MG29-1-mTRBC2-sgRNA-C1
  source 1..42: mol_type = other RNA

SEQ ID NO: 5229 - RNA, 42 nt, synthetic construct; identical to SEQ ID NO: 5199
  misc_feature 1..42: note = Description of Artificial Sequence: Synthetic oligonucleotide
  misc_feature 1..42: note = Category: MG29-1 sgRNA targeting mouse TRBC2
  misc_feature 1..42: note = Description: MG29-1-mTRBC2-sgRNA-D1
  source 1..42: mol_type = other RNA

SEQ ID NO: 5230 - RNA, 42 nt, synthetic construct
  misc_feature 1..42: note = Description of Artificial Sequence: Synthetic oligonucleotide
  misc_feature 1..42: note = Category: MG29-1 sgRNA targeting mouse TRBC2
  misc_feature 1..42: note = Description: MG29-1-mTRBC2-sgRNA-E1
  source 1..42: mol_type = other RNA
taatttctactgttgtagatctcatgagctccgcacttacct

SEQ ID NO: 5231 - RNA, 42 nt, synthetic construct; identical to SEQ ID NO: 5200
  misc_feature 1..42: note = Description of Artificial Sequence: Synthetic oligonucleotide
  misc_feature 1..42: note = Category: MG29-1 sgRNA targeting mouse TRBC2
  misc_feature 1..42: note = Description: MG29-1-mTRBC2-sgRNA-F1
  source 1..42: mol_type = other RNA

SEQ ID NO: 5232 - RNA, 42 nt, synthetic construct
  misc_feature 1..42: note = Description of Artificial Sequence: Synthetic oligonucleotide
  misc_feature 1..42: note = Category: MG29-1 sgRNA targeting mouse TRBC2
  misc_feature 1..42: note = Description: MG29-1-mTRBC2-sgRNA-G1
  source 1..42: mol_type = other RNA
taatttctactgttgtagatgaggattgtgccagaaggtagc

SEQ ID NO: 5233 - RNA, 42 nt, synthetic construct; identical to SEQ ID NO: 5201
  misc_feature 1..42: note = Description of Artificial Sequence: Synthetic oligonucleotide
  misc_feature 1..42: note = Category: MG29-1 sgRNA targeting mouse TRBC2
  misc_feature 1..42: note = Description: MG29-1-mTRBC2-sgRNA-H1
  source 1..42: mol_type = other RNA

SEQ ID NO: 5234 - RNA, 42 nt, synthetic construct; identical to SEQ ID NO: 5202
  misc_feature 1..42: note = Description of Artificial Sequence: Synthetic oligonucleotide
  misc_feature 1..42: note = Category: MG29-1 sgRNA targeting mouse TRBC2
  misc_feature 1..42: note = Description: MG29-1-mTRBC2-sgRNA-A2
  source 1..42: mol_type = other RNA

SEQ ID NO: 5235 - RNA, 42 nt, synthetic construct; identical to SEQ ID NO: 5203
  misc_feature 1..42: note = Description of Artificial Sequence: Synthetic oligonucleotide
  misc_feature 1..42: note = Category: MG29-1 sgRNA targeting mouse TRBC2
  misc_feature 1..42: note = Description: MG29-1-mTRBC2-sgRNA-B2
  source 1..42: mol_type = other RNA

SEQ ID NO: 5236 - RNA, 42 nt, synthetic construct; identical to SEQ ID NO: 5204
  misc_feature 1..42: note = Description of Artificial Sequence: Synthetic oligonucleotide
  misc_feature 1..42: note = Category: MG29-1 sgRNA targeting mouse TRBC2
  misc_feature 1..42: note = Description: MG29-1-mTRBC2-sgRNA-C2
  source 1..42: mol_type = other RNA

SEQ ID NO: 5237 - RNA, 42 nt, synthetic construct; identical to SEQ ID NO: 5205
  misc_feature 1..42: note = Description of Artificial Sequence: Synthetic oligonucleotide
  misc_feature 1..42: note = Category: MG29-1 sgRNA targeting mouse TRBC2
  misc_feature 1..42: note = Description: MG29-1-mTRBC2-sgRNA-D2
  source 1..42: mol_type = other RNA

SEQ ID NO: 5238 - RNA, 42 nt, synthetic construct; identical to SEQ ID NO: 5206
  misc_feature 1..42: note = Description of Artificial Sequence: Synthetic oligonucleotide
  misc_feature 1..42: note = Category: MG29-1 sgRNA targeting mouse TRBC2
  misc_feature 1..42: note = Description: MG29-1-mTRBC2-sgRNA-E2
  source 1..42: mol_type = other RNA

SEQ ID NO: 5239 - RNA, 42 nt, synthetic construct
  misc_feature 1..42: note = Description of Artificial Sequence: Synthetic oligonucleotide
  misc_feature 1..42: note = Category: MG29-1 sgRNA targeting mouse TRBC2
  misc_feature 1..42: note = Description: MG29-1-mTRBC2-sgRNA-F2
  source 1..42: mol_type = other RNA
taatttctactgttgtagatctccctctcctttctttcagac

SEQ ID NO: 5240 - RNA, 42 nt, synthetic construct
  misc_feature 1..42: note = Description of Artificial Sequence: Synthetic oligonucleotide
  misc_feature 1..42: note = Category: MG29-1 sgRNA targeting mouse TRBC2
  misc_feature 1..42: note = Description: MG29-1-mTRBC2-sgRNA-G2
  source 1..42: mol_type = other RNA
taatttctactgttgtagattccctctcctttctttcagact

SEQ ID NO: 5241 - RNA, 42 nt, synthetic construct
  misc_feature 1..42: note = Description of Artificial Sequence: Synthetic oligonucleotide
  misc_feature 1..42: note = Category: MG29-1 sgRNA targeting mouse TRBC2
  misc_feature 1..42: note = Description: MG29-1-mTRBC2-sgRNA-H2
  source 1..42: mol_type = other RNA
taatttctactgttgtagattttcagactgtggaatcacttc

SEQ ID NO: 5242 - RNA, 42 nt, synthetic construct
  misc_feature 1..42: note = Description of Artificial Sequence: Synthetic oligonucleotide
  misc_feature 1..42: note = Category: MG29-1 sgRNA targeting mouse TRBC2
  misc_feature 1..42: note = Description: MG29-1-mTRBC2-sgRNA-A3
  source 1..42: mol_type = other RNA
taatttctactgttgtagatagactgtggaatcacttcaggt

SEQ ID NO: 5243 - RNA, 42 nt, synthetic construct
  misc_feature 1..42: note = Description of Artificial Sequence: Synthetic oligonucleotide
  misc_feature 1..42: note = Category: MG29-1 sgRNA targeting mouse TRBC2
  misc_feature 1..42: note = Description: MG29-1-mTRBC2-sgRNA-B3
  source 1..42: mol_type = other RNA
taatttctactgttgtagatctgtcaacagcatcctatcatc

SEQ ID NO: 5244 - RNA, 42 nt, synthetic construct
  misc_feature 1..42: note = Description of Artificial Sequence: Synthetic oligonucleotide
  misc_feature 1..42: note = Category: MG29-1 sgRNA targeting mouse TRBC2
  misc_feature 1..42: note = Description: MG29-1-mTRBC2-sgRNA-C3
  source 1..42: mol_type = other RNA
taatttctactgttgtagattccatcctaccattcttaccat

SEQ ID NO: 5245 - RNA, 42 nt, synthetic construct
  misc_feature 1..42: note = Description of Artificial Sequence: Synthetic oligonucleotide
  misc_feature 1..42: note = Category: MG29-1 sgRNA targeting mouse TRBC2
  misc_feature 1..42: note = Description: MG29-1-mTRBC2-sgRNA-D3
  source 1..42: mol_type = other RNA
taatttctactgttgtagattcaggtcaagaaaaaaaattcc

SEQ ID NO: 5246 - RNA, 42 nt, synthetic construct
  misc_feature 1..42: note = Description of Artificial Sequence: Synthetic oligonucleotide
  misc_feature 1..42: note = Category: MG29-1 sgRNA targeting mouse TRBC2
  misc_feature 1..42: note = Description: MG29-1-mTRBC2-sgRNA-E3
  source 1..42: mol_type = other RNA
taatttctactgttgtagattctcaggaattttttttcttga

SEQ ID NO: 5247 - DNA, 22 bp, unidentified
  misc_feature 1..22: note = Description of Unknown: MG29-1-mTRBC2-target site-A1 sequence
  misc_feature 1..22: note = Category: DNA sequence of TRBC2 target site
  source 1..22: mol_type = unassigned DNA
ctttccagaggatctgagaaat

SEQ ID NO: 5248 - DNA, 22 bp, unidentified
  misc_feature 1..22: note = Description of Unknown: MG29-1-mTRBC2-target site-B1 sequence
  misc_feature 1..22: note = Category: DNA sequence of TRBC2 target site
  source 1..22: mol_type = unassigned DNA
cagaggatctgagaaatgtgac

SEQ ID NO: 5249 - DNA, 22 bp, unidentified
  misc_feature 1..22: note = Description of Unknown: MG29-1-mTRBC2-target site-C1 sequence
  misc_feature 1..22: note = Category: DNA sequence of TRBC2 target site
  source 1..22: mol_type = unassigned DNA
agccatcaaaagcagagattgc

SEQ ID NO: 5250 - DNA, 22 bp, unidentified
  misc_feature 1..22: note = Description of Unknown: MG29-1-mTRBC2-target site-D1 sequence
  misc_feature 1..22: note = Category: DNA sequence of TRBC2 target site
  source 1..22: mol_type = unassigned DNA
agaggaggacaagtggccagag

SEQ ID NO: 5251 - DNA, 22 bp, unidentified
  misc_feature 1..22: note = Description of Unknown: MG29-1-mTRBC2-target site-E1 sequence
  misc_feature 1..22: note = Category: DNA sequence of TRBC2 target site
  source 1..22: mol_type = unassigned DNA
ctcatgagctccgcacttacct

SEQ ID NO: 5252 - DNA, 22 bp, unidentified
  misc_feature 1..22: note = Description of Unknown: MG29-1-mTRBC2-target site-F1 sequence
  misc_feature 1..22: note = Category: DNA sequence of TRBC2 target site
  source 1..22: mol_type = unassigned DNA
ggtgagccctctggccacttgt

SEQ ID NO: 5253 - DNA, 22 bp, unidentified
  misc_feature 1..22: note = Description of Unknown: MG29-1-mTRBC2-target site-G1 sequence
  misc_feature 1..22: note = Category: DNA sequence of TRBC2 target site
  source 1..22: mol_type = unassigned DNA
gaggattgtgccagaaggtagc

SEQ ID NO: 5254 - DNA, 22 bp, unidentified
  misc_feature 1..22: note = Description of Unknown: MG29-1-mTRBC2-target site-H1 sequence
  misc_feature 1..22: note = Category: DNA sequence of TRBC2 target site
  source 1..22: mol_type = unassigned DNA
gtttgtttgcaatctctgcttt

SEQ ID NO: 5255 - DNA, 22 bp, unidentified
  misc_feature 1..22: note = Description of Unknown: MG29-1-mTRBC2-target site-A2 sequence
  misc_feature 1..22: note = Category: DNA sequence of TRBC2 target site
  source 1..22: mol_type = unassigned DNA
tttgtttgcaatctctgctttt

SEQ ID NO: 5256 - DNA, 22 bp, unidentified
  misc_feature 1..22: note = Description of Unknown: MG29-1-mTRBC2-target site-B2 sequence
  misc_feature 1..22: note = Category: DNA sequence of TRBC2 target site
  source 1..22: mol_type = unassigned DNA
tttgcaatctctgcttttgatg

SEQ ID NO: 5257 - DNA, 22 bp, unidentified
  misc_feature 1..22: note = Description of Unknown: MG29-1-mTRBC2-target site-C2 sequence
  misc_feature 1..22: note = Category: DNA sequence of TRBC2 target site
  source 1..22: mol_type = unassigned DNA
caatctctgcttttgatggctc

SEQ ID NO: 5258 - DNA, 22 bp, unidentified
  misc_feature 1..22: note = Description of Unknown: MG29-1-mTRBC2-target site-D2 sequence
  misc_feature 1..22: note = Category: DNA sequence of TRBC2 target site
  source 1..22: mol_type = unassigned DNA
gatggctcaaacaaggagacct

SEQ ID NO: 5259 - DNA, 22 bp, unidentified
  misc_feature 1..22: note = Description of Unknown: MG29-1-mTRBC2-target site-E2 sequence
  misc_feature 1..22: note = Category: DNA sequence of TRBC2 target site
  source 1..22: mol_type = unassigned DNA
atggctcaaacaaggagacctt

SEQ ID NO: 5260 - DNA, 22 bp, unidentified
  misc_feature 1..22: note = Description of Unknown: MG29-1-mTRBC2-target site-F2 sequence
  misc_feature 1..22: note = Category: DNA sequence of TRBC2 target site
  source 1..22: mol_type = unassigned DNA
ctccctctcctttctttcagac

SEQ ID NO: 5261 - DNA, 22 bp, unidentified
  misc_feature 1..22: note = Description of Unknown: MG29-1-mTRBC2-target site-G2 sequence
  misc_feature 1..22: note = Category: DNA sequence of TRBC2 target site
  source 1..22: mol_type = unassigned DNA
tccctctcctttctttcagact

SEQ ID NO: 5262 - DNA, 22 bp, unidentified
  misc_feature 1..22: note = Description of Unknown: MG29-1-mTRBC2-target site-H2 sequence
  misc_feature 1..22: note = Category: DNA sequence of TRBC2 target site
  source 1..22: mol_type = unassigned DNA
tttcagactgtggaatcacttc

SEQ ID NO: 5263 - DNA, 22 bp, unidentified
  misc_feature 1..22: note = Description of Unknown: MG29-1-mTRBC2-target site-A3 sequence
  misc_feature 1..22: note = Category: DNA sequence of TRBC2 target site
  source 1..22: mol_type = unassigned DNA
agactgtggaatcacttcaggt

SEQ ID NO: 5264 - DNA, 22 bp, unidentified
  misc_feature 1..22: note = Description of Unknown: MG29-1-mTRBC2-target site-B3 sequence
  misc_feature 1..22: note = Category: DNA sequence of TRBC2 target site
  source 1..22: mol_type = unassigned DNA
ctgtcaacagcatcctatcatc

SEQ ID NO: 5265 - DNA, 22 bp, unidentified
  misc_feature 1..22: note = Description of Unknown: MG29-1-mTRBC2-target site-C3 sequence
  misc_feature 1..22: note = Category: DNA sequence of TRBC2 target site
  source 1..22: mol_type = unassigned DNA
tccatcctaccattcttaccat

SEQ ID NO: 5266 - DNA, 22 bp, unidentified
  misc_feature 1..22: note = Description of Unknown: MG29-1-mTRBC2-target site-D3 sequence
  misc_feature 1..22: note = Category: DNA sequence of TRBC2 target site
  source 1..22: mol_type = unassigned DNA
tcaggtcaagaaaaaaaattcc

SEQ ID NO: 5267 - DNA, 22 bp, unidentified
  misc_feature 1..22: note = Description of Unknown: MG29-1-mTRBC2-target site-E3 sequence
  misc_feature 1..22: note = Category: DNA sequence of TRBC2 target site
  source 1..22: mol_type = unassigned DNA
tctcaggaattttttttcttga

SEQ ID NO: 5268 - RNA, 42 nt, synthetic construct
  misc_feature 1..42: note = Description of Artificial Sequence: Synthetic oligonucleotide
  misc_feature 1..42: note = Category: MG29-1 sgRNA targeting FAS
  misc_feature 1..42: note = Description: MG29-1-FAS-sgRNA-A1
  source 1..42: mol_type = other RNA
taatttctactgttgtagataggtaaacaaccgaactgatga

SEQ ID NO: 5269 - RNA, 42 nt, synthetic construct
  misc_feature 1..42: note = Description of Artificial Sequence: Synthetic oligonucleotide
  misc_feature 1..42: note = Category: MG29-1 sgRNA targeting FAS
  misc_feature 1..42: note = Description: MG29-1-FAS-sgRNA-B1
  source 1..42: mol_type = other RNA
taatttctactgttgtagatcctgagcaaagactcttgctac

SEQ ID NO: 5270 - RNA, 42 nt, synthetic construct
  misc_feature 1..42: note = Description of Artificial Sequence: Synthetic oligonucleotide
  misc_feature 1..42: note = Category: MG29-1 sgRNA targeting FAS
  misc_feature 1..42: note = Description: MG29-1-FAS-sgRNA-C1
  source 1..42: mol_type = other RNA
taatttctactgttgtagatcagaacgtggcatcaacatcac

SEQ ID NO: 5271 - RNA, 42 nt, synthetic construct
  misc_feature 1..42: note = Description of Artificial Sequence: Synthetic oligonucleotide
  misc_feature 1..42: note = Category: MG29-1 sgRNA targeting FAS
  misc_feature 1..42: note = Description: MG29-1-FAS-sgRNA-D1
  source 1..42: mol_type = other RNA
taatttctactgttgtagattcaccagctcccatgtgatgtt

SEQ ID NO: 5272 - RNA, 42 nt, synthetic construct
  misc_feature 1..42: note = Description of Artificial Sequence: Synthetic oligonucleotide
  misc_feature 1..42: note = Category: MG29-1 sgRNA targeting FAS
  misc_feature 1..42: note = Description: MG29-1-FAS-sgRNA-E1
  source 1..42: mol_type = other RNA
taatttctactgttgtagattgtgtctattagatgctcagag

SEQ ID NO: 5273 - RNA, 42 nt, synthetic construct
  misc_feature 1..42: note = Description of Artificial Sequence: Synthetic oligonucleotide
  misc_feature 1..42: note = Category: MG29-1 sgRNA targeting FAS
  misc_feature 1..42: note = Description: MG29-1-FAS-sgRNA-F1
  source 1..42: mol_type = other RNA
taatttctactgttgtagatgtgtctattagatgctcagagt

SEQ ID NO: 5274 - RNA, 42 nt, synthetic construct
  misc_feature 1..42: note = Description of Artificial Sequence: Synthetic oligonucleotide
  misc_feature 1..42: note = Category: MG29-1 sgRNA targeting FAS
  misc_feature 1..42: note = Description: MG29-1-FAS-sgRNA-G1
  source 1..42: mol_type = other RNA
taatttctactgttgtagattgtctattagatgctcagagtg

SEQ ID NO: 5275 - RNA, 42 nt, synthetic construct
  misc_feature 1..42: note = Description of Artificial Sequence: Synthetic oligonucleotide
  misc_feature 1..42: note = Category: MG29-1 sgRNA targeting FAS
  misc_feature 1..42: note = Description: MG29-1-FAS-sgRNA-H1
  source 1..42: mol_type = other RNA
taatttctactgttgtagatgcatctgtcactgcacttacca

SEQ ID NO: 5276 - RNA, 42 nt, synthetic construct
  misc_feature 1..42: note = Description of Artificial Sequence: Synthetic oligonucleotide
  misc_feature 1..42: note = Category: MG29-1 sgRNA targeting FAS
  misc_feature 1..42: note = Description: MG29-1-FAS-sgRNA-A2
  source 1..42: mol_type = other RNA
taatttctactgttgtagatcatctgtcactgcacttaccac

SEQ ID NO: 5277 - RNA, 42 nt, synthetic construct
  misc_feature 1..42: note = Description of Artificial Sequence: Synthetic oligonucleotide
  misc_feature 1..42: note = Category: MG29-1 sgRNA targeting FAS
  misc_feature 1..42: note = Description: MG29-1-FAS-sgRNA-B2
  source 1..42: mol_type = other RNA
taatttctactgttgtagatagtagactgttagtgccatgag

SEQ ID NO: 5278 - RNA, 42 nt, synthetic construct
  misc_feature 1..42: note = Description of Artificial Sequence: Synthetic oligonucleotide
  misc_feature 1..42: note = Category: MG29-1 sgRNA targeting FAS
  misc_feature 1..42: note = Description: MG29-1-FAS-sgRNA-C2
  source 1..42: mol_type = other RNA
taatttctactgttgtagatattttacaggttcttacgtctg

SEQ ID NO: 5279 - RNA, 42 nt, synthetic construct
  misc_feature 1..42: note = Description of Artificial Sequence: Synthetic oligonucleotide
  misc_feature 1..42: note = Category: MG29-1 sgRNA targeting FAS
  misc_feature 1..42: note = Description: MG29-1-FAS-sgRNA-D2
  source 1..42: mol_type = other RNA
taatttctactgttgtagatttttacaggttcttacgtctgt

SEQ ID NO: 5280 - RNA, 42 nt, synthetic construct
  misc_feature 1..42: note = Description of Artificial Sequence: Synthetic oligonucleotide
  misc_feature 1..42: note = Category: MG29-1 sgRNA targeting FAS
  misc_feature 1..42: note = Description: MG29-1-FAS-sgRNA-E2
  source 1..42: mol_type = other RNA
taatttctactgttgtagatacaggttcttacgtctgttgct

SEQ ID NO: 5281 - RNA, 42 nt, synthetic construct
  misc_feature 1..42: note = Description of Artificial Sequence: Synthetic oligonucleotide
  misc_feature 1..42: note = Category: MG29-1 sgRNA targeting FAS
  misc_feature 1..42: note = Description: MG29-1-FAS-sgRNA-F2
  source 1..42: mol_type = other RNA
taatttctactgttgtagatcaggttcttacgtctgttgcta

SEQ ID NO: 5282 - RNA, 42 nt, synthetic construct
  misc_feature 1..42: note = Description of Artificial Sequence: Synthetic oligonucleotide
  misc_feature 1..42: note = Category: MG29-1 sgRNA targeting FAS
  misc_feature 1..42: note = Description: MG29-1-FAS-sgRNA-G2
  source 1..42: mol_type = other RNA
taatttctactgttgtagatgtgtaacatacctggaggacag

SEQ ID NO: 5283 - RNA, 42 nt, synthetic construct
  misc_feature 1..42: note = Description of Artificial Sequence: Synthetic oligonucleotide
  misc_feature 1..42: note = Category: MG29-1 sgRNA targeting FAS
  misc_feature 1..42: note = Description: MG29-1-FAS-sgRNA-H2
  source 1..42: mol_type = other RNA
taatttctactgttgtagattgtaacatacctggaggacagg

SEQ ID NO: 5284 - RNA, 42 nt, synthetic construct
  misc_feature 1..42: note = Description of Artificial Sequence: Synthetic oligonucleotide
  misc_feature 1..42: note = Category: MG29-1 sgRNA targeting FAS
  misc_feature 1..42: note = Description: MG29-1-FAS-sgRNA-A3
  source 1..42: mol_type = other RNA
taatttctactgttgtagatggacgataatctagcaacagac

SEQ ID NO: 5285 - RNA, 42 nt, synthetic construct
  misc_feature 1..42: note = Description of Artificial Sequence: Synthetic oligonucleotide
  misc_feature 1..42: note = Category: MG29-1 sgRNA targeting FAS
  misc_feature 1..42: note = Description: MG29-1-FAS-sgRNA-B3
  source 1..42: mol_type = other RNA
taatttctactgttgtagatgacgataatctagcaacagacg

SEQ ID NO: 5286 - RNA, 42 nt, synthetic construct
  misc_feature 1..42: note = Description of Artificial Sequence: Synthetic oligonucleotide
  misc_feature 1..42: note = Category: MG29-1 sgRNA targeting FAS
  misc_feature 1..42: note = Description: MG29-1-FAS-sgRNA-C3
  source 1..42: mol_type = other RNA
taatttctactgttgtagatttccttgggcaggtgaaaggaa

SEQ ID NO: 5287 - RNA, 42 nt, synthetic construct
  misc_feature 1..42: note = Description of Artificial Sequence: Synthetic oligonucleotide
  misc_feature 1..42: note = Category: MG29-1 sgRNA targeting FAS
  misc_feature 1..42: note = Description: MG29-1-FAS-sgRNA-D3
  source 1..42: mol_type = other RNA
taatttctactgttgtagattccttgggcaggtgaaaggaaa

SEQ ID NO: 5288 - RNA, 42 nt, synthetic construct
  misc_feature 1..42: note = Description of Artificial Sequence: Synthetic oligonucleotide
  misc_feature 1..42: note = Category: MG29-1 sgRNA targeting FAS
  misc_feature 1..42: note = Description: MG29-1-FAS-sgRNA-E3
  source 1..42: mol_type = other RNA
taatttctactgttgtagatccttgggcaggtgaaaggaaag

SEQ ID NO: 5289 - RNA, 42 nt, synthetic construct
  misc_feature 1..42: note = Description of Artificial Sequence: Synthetic oligonucleotide
  misc_feature 1..42: note = Category: MG29-1 sgRNA targeting FAS
  misc_feature 1..42: note = Description: MG29-1-FAS-sgRNA-F3
  source 1..42: mol_type = other RNA
taatttctactgttgtagatcttgggcaggtgaaaggaaagc

SEQ ID NO: 5290 - RNA, 42 nt, synthetic construct
  misc_feature 1..42: note = Description of Artificial Sequence: Synthetic oligonucleotide
  misc_feature 1..42: note = Category: MG29-1 sgRNA targeting FAS
  misc_feature 1..42: note = Description: MG29-1-FAS-sgRNA-G3
  source 1..42: mol_type = other RNA
taatttctactgttgtagattcttccaaatgcagaagatgta

SEQ ID NO: 5291 - RNA, 42 nt, synthetic construct
  misc_feature 1..42: note = Description of Artificial Sequence: Synthetic oligonucleotide
  misc_feature 1..42: note = Category: MG29-1 sgRNA targeting FAS
  misc_feature 1..42: note = Description: MG29-1-FAS-sgRNA-H3
  source 1..42: mol_type = other RNA
taatttctactgttgtagatcttccaaatgcagaagatgtag

SEQ ID NO: 5292 - RNA, 42 nt, synthetic construct
  misc_feature 1..42: note = Description of Artificial Sequence: Synthetic oligonucleotide
  misc_feature 1..42: note = Category: MG29-1 sgRNA targeting FAS
  misc_feature 1..42: note = Description: MG29-1-FAS-sgRNA-A4
  source 1..42: mol_type = other RNA
taatttctactgttgtagatttccaaatgcagaagatgtaga

SEQ ID NO: 5293 - RNA, 42 nt, synthetic construct
  misc_feature 1..42: note = Description of Artificial Sequence: Synthetic oligonucleotide
  misc_feature 1..42: note = Category: MG29-1 sgRNA targeting FAS
  misc_feature 1..42: note = Description: MG29-1-FAS-sgRNA-B4
  source 1..42: mol_type = other RNA
taatttctactgttgtagataagactcttaccatgtccttca

SEQ ID NO: 5294 - RNA, 42 nt, synthetic construct
  misc_feature 1..42: note = Description of Artificial Sequence: Synthetic oligonucleotide
  misc_feature 1..42: note = Category: MG29-1 sgRNA targeting FAS
  misc_feature 1..42: note = Description: MG29-1-FAS-sgRNA-C4
  source 1..42: mol_type = other RNA
taatttctactgttgtagatagactcttaccatgtccttcat

SEQ ID NO: 5295 - RNA, 42 nt, synthetic construct
  misc_feature 1..42: note = Description of Artificial Sequence: Synthetic oligonucleotide
  misc_feature 1..42: note = Category: MG29-1 sgRNA targeting FAS
  misc_feature 1..42: note = Description: MG29-1-FAS-sgRNA-D4
  source 1..42: mol_type = other RNA
taatttctactgttgtagatgaagaaaaatgggctttgtctg

SEQ ID NO: 5296 - RNA, 42 nt, synthetic construct
  misc_feature 1..42: note = Description of Artificial Sequence: Synthetic oligonucleotide
  misc_feature 1..42: note = Category: MG29-1 sgRNA targeting FAS
  misc_feature 1..42: note = Description: MG29-1-FAS-sgRNA-E4
  source 1..42: mol_type = other RNA
taatttctactgttgtagattctgtgtactccttcccttctt

SEQ ID NO: 5297 - RNA, 42 nt, synthetic construct
  misc_feature 1..42: note = Description of Artificial Sequence: Synthetic oligonucleotide
  misc_feature 1..42: note = Category: MG29-1 sgRNA targeting FAS
  misc_feature 1..42: note = Description: MG29-1-FAS-sgRNA-F4
  source 1..42: mol_type = other RNA
taatttctactgttgtagatcaaactgattttctaggcttag

SEQ ID NO: 5298 - RNA, 42 nt, synthetic construct
  misc_feature 1..42: note = Description of Artificial Sequence: Synthetic oligonucleotide
  misc_feature 1..42: note = Category: MG29-1 sgRNA targeting FAS
  misc_feature 1..42: note = Description: MG29-1-FAS-sgRNA-G4
  source 1..42: mol_type = other RNA
taatttctactgttgtagatctaggcttagaagtggaaataa

SEQ ID NO: 5299 - RNA, 42 nt, synthetic construct
  misc_feature 1..42: note = Description of Artificial Sequence: Synthetic oligonucleotide
  misc_feature 1..42: note = Category: MG29-1 sgRNA targeting FAS
  misc_feature 1..42: note = Description: MG29-1-FAS-sgRNA-H4
  source 1..42: mol_type = other RNA
taatttctactgttgtagattaggcttagaagtggaaataaa

SEQ ID NO: 5300 - RNA, 42 nt, synthetic construct
  misc_feature 1..42: note = Description of Artificial Sequence: Synthetic oligonucleotide
  misc_feature 1..42: note = Category: MG29-1 sgRNA targeting FAS
  misc_feature 1..42: note = Description: MG29-1-FAS-sgRNA-A5
  source 1..42: mol_type = other RNA
taatttctactgttgtagattttgtaactctactgtatgtga

SEQ ID NO: 5301 - RNA, 42 nt, synthetic construct
  misc_feature 1..42: note = Description of Artificial Sequence: Synthetic oligonucleotide
  misc_feature 1..42: note = Category: MG29-1 sgRNA targeting FAS
  misc_feature 1..42: note = Description: MG29-1-FAS-sgRNA-B5
  source 1..42: mol_type = other RNA
taatttctactgttgtagatttgtaactctactgtatgtgaa

SEQ ID NO: 5302 - RNA, 42 nt, synthetic construct
  misc_feature 1..42: note = Description of Artificial Sequence: Synthetic oligonucleotide
  misc_feature 1..42: note = Category: MG29-1 sgRNA targeting FAS
  misc_feature 1..42: note = Description: MG29-1-FAS-sgRNA-C5
  source 1..42: mol_type = other RNA
taatttctactgttgtagattgtaactctactgtatgtgaac

SEQ ID NO: 5303 - RNA, 42 nt, synthetic construct
  misc_feature 1..42: note = Description of Artificial Sequence: Synthetic oligonucleotide
  misc_feature 1..42: note = Category: MG29-1 sgRNA targeting FAS
  misc_feature 1..42: note = Description: MG29-1-FAS-sgRNA-D5
  source 1..42: mol_type = other RNA
taatttctactgttgtagatgtaactctactgtatgtgaaca

SEQ ID NO: 5304 - RNA, 42 nt, synthetic construct
  misc_feature 1..42: note = Description of Artificial Sequence: Synthetic oligonucleotide
  misc_feature 1..42: note = Category: MG29-1 sgRNA targeting FAS
  misc_feature 1..42: note = Description: MG29-1-FAS-sgRNA-E5
  source 1..42: mol_type = other RNA
taatttctactgttgtagattaactctactgtatgtgaacac

SEQ ID NO: 5305 - RNA, 42 nt, synthetic construct
  misc_feature 1..42: note = Description of Artificial Sequence: Synthetic oligonucleotide
  misc_feature 1..42: note = Category: MG29-1 sgRNA targeting FAS
  misc_feature 1..42: note = Description: MG29-1-FAS-sgRNA-F5
  source 1..42: mol_type = other RNA
taatttctactgttgtagatgtttacatctgcacttggtatt

SEQ ID NO: 5306 - RNA, 42 nt, synthetic construct
  misc_feature 1..42: note = Description of Artificial Sequence: Synthetic oligonucleotide
  misc_feature 1..42: note = Category: MG29-1 sgRNA targeting FAS
  misc_feature 1..42: note = Description: MG29-1-FAS-sgRNA-G5
  source 1..42: mol_type = other RNA
taatttctactgttgtagatcatctgcacttggtattctggg

SEQ ID NO: 5307 - RNA, 42 nt, synthetic construct
  misc_feature 1..42: note = Description of Artificial Sequence: Synthetic oligonucleotide
  misc_feature 1..42: note = Category: MG29-1 sgRNA targeting FAS
  misc_feature 1..42: note = Description: MG29-1-FAS-sgRNA-H5
  source 1..42: mol_type = other RNA
taatttctactgttgtagattcctgtatttttttttctagat

SEQ ID NO: 5308 - RNA, 42 nt, synthetic construct
  misc_feature 1..42: note = Description of Artificial Sequence: Synthetic oligonucleotide
  misc_feature 1..42: note = Category: MG29-1 sgRNA targeting FAS
  misc_feature 1..42: note = Description: MG29-1-FAS-sgRNA-A6
  source 1..42: mol_type = other RNA
taatttctactgttgtagattttttctagatgtgaacatgga

SEQ ID NO: 5309 - RNA, 42 nt, synthetic construct
  misc_feature 1..42: note = Description of Artificial Sequence: Synthetic oligonucleotide
  misc_feature 1..42: note = Category: MG29-1 sgRNA targeting FAS
  misc_feature 1..42: note = Description: MG29-1-FAS-sgRNA-B6
  source 1..42: mol_type = other RNA
taatttctactgttgtagatttttctagatgtgaacatggaa

SEQ ID NO: 5310 - RNA, 42 nt, synthetic construct
  misc_feature 1..42: note = Description of Artificial Sequence: Synthetic oligonucleotide
  misc_feature 1..42: note = Category: MG29-1 sgRNA targeting FAS
  misc_feature 1..42: note = Description: MG29-1-FAS-sgRNA-C6
  source 1..42: mol_type = other RNA
taatttctactgttgtagattttctagatgtgaacatggaat

SEQ ID NO: 5311 - RNA, 42 nt, synthetic construct
  misc_feature 1..42: note = Description of Artificial Sequence: Synthetic oligonucleotide
  misc_feature 1..42: note = Category: MG29-1 sgRNA targeting FAS
  misc_feature 1..42: note = Description: MG29-1-FAS-sgRNA-D6
  source 1..42: mol_type = other RNA
taatttctactgttgtagatttctagatgtgaacatggaatc

SEQ ID NO: 5312 - RNA, 42 nt, synthetic construct
  misc_feature 1..42: note = Description of Artificial Sequence: Synthetic oligonucleotide
  misc_feature 1..42: note = Category: MG29-1 sgRNA targeting FAS
  misc_feature 1..42: note = Description: MG29-1-FAS-sgRNA-E6
  source 1..42: mol_type = other RNA
taatttctactgttgtagattctagatgtgaacatggaatca

SEQ ID NO: 5313 - RNA, 42 nt, synthetic construct
  misc_feature 1..42: note = Description of Artificial Sequence: Synthetic oligonucleotide
  misc_feature 1..42: note = Category: MG29-1 sgRNA targeting FAS
  misc_feature 1..42: note = Description: MG29-1-FAS-sgRNA-F6
  source 1..42: mol_type = other RNA
taatttctactgttgtagatctagatgtgaacatggaatcat

SEQ ID NO: 5314 - RNA, 42 nt, synthetic construct
  misc_feature 1..42: note = Description of Artificial Sequence: Synthetic oligonucleotide
  misc_feature 1..42: note = Category: MG29-1 sgRNA targeting FAS
  misc_feature 1..42: note = Description: MG29-1-FAS-sgRNA-G6
  source 1..42: mol_type = other RNA
taatttctactgttgtagattagatgtgaacatggaatcatc

SEQ ID NO: 5315 - RNA, 42 nt, synthetic construct
  misc_feature 1..42: note = Description of Artificial Sequence: Synthetic oligonucleotide
  misc_feature 1..42: note = Category: MG29-1 sgRNA targeting FAS
  misc_feature 1..42: note = Description: MG29-1-FAS-sgRNA-H6
  source 1..42: mol_type = other RNA
taatttctactgttgtagatcacttggtgttgctggtgagtg

SEQ ID NO: 5316 - RNA, 42 nt, synthetic construct
  misc_feature 1..42: note = Description of Artificial Sequence: Synthetic oligonucleotide
  misc_feature 1..42: note = Category: MG29-1 sgRNA targeting FAS
  misc_feature 1..42: note = Description: MG29-1-FAS-sgRNA-A7
  source 1..42: mol_type = other RNA
taatttctactgttgtagattcttcttcttttgccaattcca

SEQ ID NO: 5317 - RNA, 42 nt, synthetic construct
  misc_feature 1..42: note = Description of Artificial Sequence: Synthetic oligonucleotide
  misc_feature 1..42: note = Category: MG29-1 sgRNA targeting FAS
  misc_feature 1..42: note = Description: MG29-1-FAS-sgRNA-B7
  source 1..42: mol_type = other RNA
taatttctactgttgtagatgccaattccactaattgtttgg

SEQ ID NO: 5318 - RNA, 42 nt, synthetic construct
  misc_feature 1..42: note = Description of Artificial Sequence: Synthetic oligonucleotide
  misc_feature 1..42: note = Category: MG29-1 sgRNA targeting FAS
  misc_feature 1..42: note = Description: MG29-1-FAS-sgRNA-C7
  source 1..42: mol_type = other RNA
taatttctactgttgtagatccaattccactaattgtttggg

SEQ ID NO: 5319 - RNA, 42 nt, synthetic construct
  misc_feature 1..42: note = Description of Artificial Sequence: Synthetic oligonucleotide
  misc_feature 1..42: note = Category: MG29-1 sgRNA targeting FAS
  misc_feature 1..42: note = Description: MG29-1-FAS-sgRNA-D7
  source 1..42: mol_type = other RNA
taatttctactgttgtagataacaaagcaagaacttacccca

SEQ ID NO: 5320 - RNA, 42 nt, synthetic construct
  misc_feature 1..42: note = Description of Artificial Sequence: Synthetic oligonucleotide
  misc_feature 1..42: note = Category: MG29-1 sgRNA targeting FAS
  misc_feature 1..42: note = Description: MG29-1-FAS-sgRNA-E7
  source 1..42: mol_type = other RNA
taatttctactgttgtagattttgttctttcagtgaagagaa

SEQ ID NO: 5321 - RNA, 42 nt, synthetic construct
  misc_feature 1..42: note = Description of Artificial Sequence: Synthetic oligonucleotide
  misc_feature 1..42: note = Category: MG29-1 sgRNA targeting FAS
  misc_feature 1..42: note = Description: MG29-1-FAS-sgRNA-F7
  source 1..42: mol_type = other RNA
taatttctactgttgtagatttctttcagtgaagagaaagga

SEQ ID NO: 5322 - RNA, 42 nt, synthetic construct
  misc_feature 1..42: note = Description of Artificial Sequence: Synthetic oligonucleotide
  misc_feature 1..42: note = Category: MG29-1 sgRNA targeting FAS
  misc_feature 1..42: note = Description: MG29-1-FAS-sgRNA-G7
  source 1..42: mol_type = other RNA
taatttctactgttgtagatagtgaagagaaaggaagtacag

SEQ ID NO: 5323 - RNA, 42 nt, synthetic construct
  misc_feature 1..42: note = Description of Artificial Sequence: Synthetic oligonucleotide
  misc_feature 1..42: note = Category: MG29-1 sgRNA targeting FAS
  misc_feature 1..42: note = Description: MG29-1-FAS-sgRNA-H7
  source 1..42: mol_type = other RNA
taatttctactgttgtagataatacctacaggatttaaagtt

SEQ ID NO: 5324 - RNA, 42 nt, synthetic construct
  misc_feature 1..42: note = Description of Artificial Sequence: Synthetic oligonucleotide
  misc_feature 1..42: note = Category: MG29-1 sgRNA targeting FAS
  misc_feature 1..42: note = Description: MG29-1-FAS-sgRNA-A8
  source 1..42: mol_type = other RNA
taatttctactgttgtagataagttggagattcatgagaacc

SEQ ID NO: 5325 - RNA, 42 nt, synthetic construct
  misc_feature 1..42: note = Description of Artificial Sequence: Synthetic oligonucleotide
  misc_feature 1..42: note = Category: MG29-1 sgRNA targeting FAS
  misc_feature 1..42: note = Description: MG29-1-FAS-sgRNA-B8
  source 1..42: mol_type = other RNA
taatttctactgttgtagatcctttctgtgctttctgcatgt

SEQ ID NO: 5326 - RNA, 42 nt, synthetic construct
  misc_feature 1..42: note = Description of Artificial Sequence: Synthetic oligonucleotide
  misc_feature 1..42: note = Category: MG29-1 sgRNA targeting FAS
  misc_feature 1..42: note = Description: MG29-1-FAS-sgRNA-C8
  source 1..42: mol_type = other RNA
taatttctactgttgtagatctttctgtgctttctgcatgtt

SEQ ID NO: 5327 - RNA, 42 nt, synthetic construct
  misc_feature 1..42: note = Description of Artificial Sequence: Synthetic oligonucleotide
  misc_feature 1..42: note = Category: MG29-1 sgRNA targeting FAS
  misc_feature 1..42: note = Description: MG29-1-FAS-sgRNA-D8
  source 1..42: mol_type = other RNA
taatttctactgttgtagattgtgctttctgcatgttttctg

SEQ ID NO: 5328 - RNA, 42 nt, synthetic construct
  misc_feature 1..42: note = Description of Artificial Sequence: Synthetic oligonucleotide
  misc_feature 1..42: note = Category: MG29-1 sgRNA targeting FAS
  misc_feature 1..42: note = Description: MG29-1-FAS-sgRNA-E8
  source 1..42: mol_type = other RNA
taatttctactgttgtagattgcatgttttctgtacttcctt

SEQ ID NO: 5329 - RNA, 42 nt, synthetic construct
  misc_feature 1..42: note = Description of Artificial Sequence: Synthetic oligonucleotide
  misc_feature 1..42: note = Category: MG29-1 sgRNA targeting FAS
  misc_feature 1..42: note = Description: MG29-1-FAS-sgRNA-F8
  source 1..42: mol_type = other RNA
taatttctactgttgtagatctgtacttcctttctcttcact

SEQ ID NO: 5330 - RNA, 42 nt, synthetic construct
  misc_feature 1..42: note = Description of Artificial Sequence: Synthetic oligonucleotide
  misc_feature 1..42: note = Category: MG29-1 sgRNA targeting FAS
  misc_feature 1..42: note = Description: MG29-1-FAS-sgRNA-G8
  source 1..42: mol_type = other RNA
taatttctactgttgtagatttgctttctaggaaacagtggc

SEQ ID NO: 5331 - RNA, 42 nt, synthetic construct
  misc_feature 1..42: note = Description of Artificial Sequence: Synthetic oligonucleotide
  misc_feature 1..42: note = Category: MG29-1 sgRNA targeting FAS
  misc_feature 1..42: note = Description: MG29-1-FAS-sgRNA-H8
  source 1..42: mol_type = other RNA
taatttctactgttgtagattgctttctaggaaacagtggca

SEQ ID NO: 5332 - RNA, 42 nt, synthetic construct
  misc_feature 1..42: note = Description of Artificial Sequence: Synthetic oligonucleotide
  misc_feature 1..42: note = Category: MG29-1 sgRNA targeting FAS
  misc_feature 1..42: note = Description: MG29-1-FAS-sgRNA-A9
  source 1..42: mol_type = other RNA
taatttctactgttgtagatgctttctaggaaacagtggcaa

SEQ ID NO: 5333 - RNA, 42 nt, synthetic construct
  misc_feature 1..42: note = Description of Artificial Sequence: Synthetic oligonucleotide
  misc_feature 1..42: note = Category: MG29-1 sgRNA targeting FAS
  misc_feature 1..42: note = Description: MG29-1-FAS-sgRNA-B9
  source 1..42: mol_type = other RNA
taatttctactgttgtagatctttctaggaaacagtggcaat

SEQ ID NO: 5334 - RNA, 42 nt, synthetic construct
  misc_feature 1..42: note = Description of Artificial Sequence: Synthetic oligonucleotide
  misc_feature 1..42: note = Category: MG29-1 sgRNA targeting FAS
  misc_feature 1..42: note = Description: MG29-1-FAS-sgRNA-C9
  source 1..42: mol_type = other RNA
taatttctactgttgtagattaggaaacagtggcaataaatt

SEQ ID NO: 5335 - RNA, 42 nt, synthetic construct
  misc_feature 1..42: note = Description of Artificial Sequence: Synthetic oligonucleotide
  misc_feature 1..42: note = Category: MG29-1 sgRNA targeting FAS
  misc_feature 1..42: note = Description: MG29-1-FAS-sgRNA-D9
  source 1..42: mol_type = other RNA
taatttctactgttgtagatagactattttctatttttcaga

SEQ ID NO: 5336 - RNA, 42 nt, synthetic construct
  misc_feature 1..42: note = Description of Artificial Sequence: Synthetic oligonucleotide
  misc_feature 1..42: note = Category: MG29-1 sgRNA targeting FAS
  misc_feature 1..42: note = Description: MG29-1-FAS-sgRNA-E9
  source 1..42: mol_type = other RNA
taatttctactgttgtagatctatttttcagatgttgacttg

SEQ ID NO: 5337 - RNA, 42 nt, synthetic construct
  misc_feature 1..42: note = Description of Artificial Sequence: Synthetic oligonucleotide
  misc_feature 1..42: note = Category: MG29-1 sgRNA targeting FAS
  misc_feature 1..42: note = Description: MG29-1-FAS-sgRNA-F9
  source 1..42: mol_type = other RNA
taatttctactgttgtagattatttttcagatgttgacttga

SEQ ID NO: 5338 - RNA, 42 nt, synthetic construct
  misc_feature 1..42: note = Description of Artificial Sequence: Synthetic oligonucleotide
  misc_feature 1..42: note = Category: MG29-1 sgRNA targeting FAS
  misc_feature 1..42: note = Description: MG29-1-FAS-sgRNA-G9
  source 1..42: mol_type = other RNA
taatttctactgttgtagattcagatgttgacttgagtaaat

SEQ ID NO: 5339 - RNA, 42 nt, synthetic construct
  misc_feature 1..42: note = Description of Artificial Sequence: Synthetic oligonucleotide
  misc_feature 1..42: note = Category: MG29-1 sgRNA targeting FAS
  misc_feature 1..42: note = Description: MG29-1-FAS-sgRNA-H9
  source 1..42: mol_type = other RNA
taatttctactgttgtagatcagatgttgacttgagtaaata

SEQ ID NO: 5340 - RNA, 42 nt, synthetic construct
  misc_feature 1..42: note = Description of Artificial Sequence: Synthetic oligonucleotide
  misc_feature 1..42: note = Category: MG29-1 sgRNA targeting FAS
  misc_feature 1..42: note = Description: MG29-1-FAS-sgRNA-A10
  source 1..42: mol_type = other RNA
taatttctactgttgtagatagatgttgacttgagtaaatat

SEQ ID NO: 5341 - RNA, 42 nt, synthetic construct
  misc_feature 1..42: note = Description of Artificial Sequence: Synthetic oligonucleotide
  misc_feature 1..42: note = Category: MG29-1 sgRNA targeting FAS
  misc_feature 1..42: note = Description: MG29-1-FAS-sgRNA-B10
  source 1..42: mol_type = other RNA
taatttctactgttgtagatttcgaaagaatggtgtcaatga

SEQ ID NO: 5342 - RNA, 42 nt, synthetic construct
  misc_feature 1..42: note = Description of Artificial Sequence: Synthetic oligonucleotide
  misc_feature 1..42: note = Category: MG29-1 sgRNA targeting FAS
  misc_feature 1..42: note = Description: MG29-1-FAS-sgRNA-C10
  source 1..42: mol_type = other RNA
taatttctactgttgtagattactcttgcagagaaaattcag

SEQ ID NO: 5343 - RNA, 42 nt, synthetic construct
  misc_feature 1..42: note = Description of Artificial Sequence: Synthetic oligonucleotide
  misc_feature 1..42: note = Category: MG29-1 sgRNA targeting FAS
  misc_feature 1..42: note = Description: MG29-1-FAS-sgRNA-D10
  source 1..42: mol_type = other RNA
taatttctactgttgtagatttgtttttcactctagaccaag

SEQ ID NO: 5344 - RNA, 42 nt, synthetic construct
  misc_feature 1..42: note = Description of Artificial Sequence: Synthetic oligonucleotide
  misc_feature 1..42: note = Category: MG29-1 sgRNA targeting FAS
  misc_feature 1..42: note = Description: MG29-1-FAS-sgRNA-E10
  source 1..42: mol_type = other RNA
taatttctactgttgtagattcactctagaccaagctttgga

SEQ ID NO: 5345 - RNA, 42 nt, synthetic construct
  misc_feature 1..42: note = Description of Artificial Sequence: Synthetic oligonucleotide
  misc_feature 1..42: note = Category: MG29-1 sgRNA targeting FAS
  misc_feature 1..42: note = Description: MG29-1-FAS-sgRNA-F10
  source 1..42: mol_type = other RNA
taatttctactgttgtagatcactctagaccaagctttggat

SEQ ID NO: 5346 - RNA, 42 nt, synthetic construct
  misc_feature 1..42: note = Description of Artificial Sequence: Synthetic oligonucleotide
  misc_feature 1..42: note = Category: MG29-1 sgRNA targeting FAS
  misc_feature 1..42: note = Description: MG29-1-FAS-sgRNA-G10
  source 1..42: mol_type = other RNA
taatttctactgttgtagatactctagaccaagctttggatt

SEQ ID NO: 5347 - RNA, 42 nt, synthetic construct
  misc_feature 1..42: note = Description of Artificial Sequence: Synthetic oligonucleotide
  misc_feature 1..42: note = Category: MG29-1 sgRNA targeting FAS
  misc_feature 1..42: note = Description: MG29-1-FAS-sgRNA-H10
  source 1..42: mol_type = other RNA
taatttctactgttgtagatgatttcatttctgaagtttgaa

SEQ ID NO: 5348 - RNA, 42 nt, synthetic construct
  misc_feature 1..42: note = Description of Artificial Sequence: Synthetic oligonucleotide
  misc_feature 1..42: note = Category: MG29-1 sgRNA targeting FAS
  misc_feature 1..42: note = Description: MG29-1-FAS-sgRNA-A11
  source 1..42: mol_type = other RNA
taatttctactgttgtagatatttctgaagtttgaattttct

SEQ ID NO: 5349 - RNA, 42 nt, synthetic construct
  misc_feature 1..42: note = Description of Artificial Sequence: Synthetic oligonucleotide
  misc_feature 1..42: note = Category: MG29-1 sgRNA targeting FAS
  misc_feature 1..42: note = Description: MG29-1-FAS-sgRNA-B11
  source 1..42: mol_type = other RNA
taatttctactgttgtagattgaagtttgaattttctgagtc

SEQ ID NO: 5350 - RNA, 42 nt, synthetic construct
  misc_feature 1..42: note = Description of Artificial Sequence: Synthetic oligonucleotide
  misc_feature 1..42: note = Category: MG29-1 sgRNA targeting FAS
  misc_feature 1..42: note = Description: MG29-1-FAS-sgRNA-C11
  source 1..42: mol_type = other RNA
taatttctactgttgtagataattttctgagtcactagtaat

SEQ ID NO: 5351 - RNA, 42 nt, synthetic construct
  misc_feature 1..42: note = Description of Artificial Sequence: Synthetic oligonucleotide
  misc_feature 1..42: note = Category: MG29-1 sgRNA targeting FAS
  misc_feature 1..42: note = Description: MG29-1-FAS-sgRNA-D11
  source 1..42: mol_type = other RNA
taatttctactgttgtagatctgagtcactagtaatgtcctt

SEQ ID NO: 5352 - RNA, 42 nt, synthetic construct
  misc_feature 1..42: note = Description of Artificial Sequence: Synthetic oligonucleotide
  misc_feature 1..42: note = Category: MG29-1 sgRNA targeting FAS
  misc_feature 1..42: note = Description: MG29-1-FAS-sgRNA-E11
  source 1..42: mol_type = other RNA
taatttctactgttgtagattgagtcactagtaatgtccttg

SEQ ID NO: 5353 - RNA, 42 nt, synthetic construct
  misc_feature 1..42: note = Description of Artificial Sequence: Synthetic oligonucleotide
  misc_feature 1..42: note = Category: MG29-1 sgRNA targeting FAS
  misc_feature 1..42: note = Description: MG29-1-FAS-sgRNA-F11
  source 1..42: mol_type = other RNA
taatttctactgttgtagatctctgcaagagtacaaagattg

SEQ ID NO: 5354 - RNA, 42 nt, synthetic construct
  misc_feature 1..42: note = Description of Artificial Sequence: Synthetic oligonucleotide
  misc_feature 1..42: note = Category: MG29-1 sgRNA targeting FAS
  misc_feature 1..42: note = Description: MG29-1-FAS-sgRNA-G11
  source 1..42: mol_type = other RNA
taatttctactgttgtagattctgcaagagtacaaagattgg

SEQ ID NO: 5355 - RNA, 42 nt, synthetic construct
  misc_feature 1..42: note = Description of Artificial Sequence: Synthetic oligonucleotide
  misc_feature 1..42: note = Category: MG29-1 sgRNA targeting FAS
  misc_feature 1..42: note = Description: MG29-1-FAS-sgRNA-H11
  source 1..42: mol_type = other RNA
taatttctactgttgtagatttgagatctttaatcaatgtgt

SEQ ID NO: 5356 - RNA, 42 nt, synthetic construct
  misc_feature 1..42: note = Description of Artificial Sequence: Synthetic oligonucleotide
  misc_feature 1..42: note = Category: MG29-1 sgRNA targeting FAS
  misc_feature 1..42: note = Description: MG29-1-FAS-sgRNA-A12
  source 1..42: mol_type = other RNA
taatttctactgttgtagattgagatctttaatcaatgtgtc

SEQ ID NO: 5357 - RNA, 42 nt, synthetic construct
  misc_feature 1..42: note = Description of Artificial Sequence: Synthetic oligonucleotide
  misc_feature 1..42: note = Category: MG29-1 sgRNA targeting FAS
  misc_feature 1..42: note = Description: MG29-1-FAS-sgRNA-B12
  source 1..42: mol_type = other RNA
taatttctactgttgtagatgagatctttaatcaatgtgtca

SEQ ID NO: 5358 - RNA, 42 nt, synthetic construct
  misc_feature 1..42: note = Description of Artificial Sequence: Synthetic oligonucleotide
  misc_feature 1..42: note = Category: MG29-1 sgRNA targeting FAS
  misc_feature 1..42: note = Description: MG29-1-FAS-sgRNA-C12
  source 1..42: mol_type = other RNA
taatttctactgttgtagatagatctttaatcaatgtgtcat

SEQ ID NO: 5359 - RNA, 42 nt, synthetic construct
  misc_feature 1..42: note = Description of Artificial Sequence: Synthetic oligonucleotide
  misc_feature 1..42: note = Category: MG29-1 sgRNA targeting FAS
  misc_feature 1..42: note = Description: MG29-1-FAS-sgRNA-D12
  source 1..42: mol_type = other RNA
taatttctactgttgtagatatcaatgtgtcatacgcttctt

SEQ ID NO: 5360 - RNA, 42 nt, synthetic construct
  misc_feature 1..42: note = Description of Artificial Sequence: Synthetic oligonucleotide
  misc_feature 1..42: note = Category: MG29-1 sgRNA targeting FAS
  misc_feature 1..42: note = Description: MG29-1-FAS-sgRNA-E12
  source 1..42: mol_type = other RNA
taatttctactgttgtagattttccatgaagttgatgccaat

SEQ ID NO: 5361 - RNA, 42 nt, synthetic construct
  misc_feature 1..42: note = Description of Artificial Sequence: Synthetic oligonucleotide
  misc_feature 1..42: note = Category: MG29-1 sgRNA targeting FAS
  misc_feature 1..42: note = Description: MG29-1-FAS-sgRNA-F12
  source 1..42: mol_type = other RNA
taatttctactgttgtagatcatgaagttgatgccaattacg

SEQ ID NO: 5362 - RNA, 42 nt, synthetic construct
  misc_feature 1..42: note = Description of Artificial Sequence: Synthetic oligonucleotide
  misc_feature 1..42: note = Category: MG29-1 sgRNA targeting FAS
  misc_feature 1..42: note = Description: MG29-1-FAS-sgRNA-G12
  source 1..42: mol_type = other RNA
taatttctactgttgtagattgttctgctgtgtcttggacat

SEQ ID NO: 5363 - RNA, 42 nt, synthetic construct
  misc_feature 1..42: note = Description of Artificial Sequence: Synthetic oligonucleotide
  misc_feature 1..42: note = Category: MG29-1 sgRNA targeting FAS
  misc_feature 1..42: note = Description: MG29-1-FAS-sgRNA-H12
  source 1..42: mol_type = other RNA
taatttctactgttgtagatggcttcattgacaccattcttt

SEQ ID NO: 5364 - RNA, 42 nt, synthetic construct
  misc_feature 1..42: note = Description of Artificial Sequence: Synthetic oligonucleotide
  misc_feature 1..42: note = Category: MG29-1 sgRNA targeting FAS
  misc_feature 1..42: note = Description: MG29-1-FAS-sgRNA-A13
  source 1..42: mol_type = other RNA
taatttctactgttgtagatgcttcattgacaccattctttc

SEQ ID NO: 5365 - RNA, 42 nt, synthetic construct
  misc_feature 1..42: note = Description of Artificial Sequence: Synthetic oligonucleotide
  misc_feature 1..42: note = Category: MG29-1 sgRNA targeting FAS
  misc_feature 1..42: note = Description: MG29-1-FAS-sgRNA-B13
  source 1..42: mol_type = other RNA
taatttctactgttgtagatgaacaaagcctttaacttgact

SEQ ID NO: 5366 - RNA, 42 nt, synthetic construct
  misc_feature 1..42: note = Description of Artificial Sequence: Synthetic oligonucleotide
  misc_feature 1..42: note = Category: MG29-1 sgRNA targeting FAS
  misc_feature 1..42: note = Description: MG29-1-FAS-sgRNA-C13
  source 1..42: mol_type = other RNA
taatttctactgttgtagatacttgacttagtgtcatgactc

SEQ ID NO: 5367 - DNA, 22 bp, unidentified
  misc_feature 1..22: note = Description of Unknown: MG29-1-FAS-target site-A1 sequence
  misc_feature 1..22: note = Category: DNA sequence of FAS target site
  source 1..22: mol_type = unassigned DNA
aggtaaacaaccgaactgatga

SEQ ID NO: 5368 - DNA, 22 bp, unidentified
  misc_feature 1..22: note = Description of Unknown: MG29-1-FAS-target site-B1 sequence
  misc_feature 1..22: note = Category: DNA sequence of FAS target site
  source 1..22: mol_type = unassigned DNA
cctgagcaaagactcttgctac

SEQ ID NO: 5369 - DNA, 22 bp, unidentified
  misc_feature 1..22: note = Description of Unknown: MG29-1-FAS-target site-C1 sequence
  misc_feature 1..22: note = Category: DNA sequence of FAS target site
  source 1..22: mol_type = unassigned DNA
cagaacgtggcatcaacatcac

SEQ ID NO: 5370 - DNA, 22 bp, unidentified
  misc_feature 1..22: note = Description of Unknown: MG29-1-FAS-target site-D1 sequence
  misc_feature 1..22: note = Category: DNA sequence of FAS target site
  source 1..22: mol_type = unassigned DNA
tcaccagctcccatgtgatgtt

SEQ ID NO: 5371 - DNA, 22 bp, unidentified
  misc_feature 1..22: note = Description of Unknown: MG29-1-FAS-target site-E1 sequence
  misc_feature 1..22: note = Category: DNA sequence of FAS target site
  source 1..22: mol_type = unassigned DNA
tgtgtctattagatgctcagag

SEQ ID NO: 5372 - DNA, 22 bp, unidentified
  misc_feature 1..22: note = Description of Unknown: MG29-1-FAS-target site-F1 sequence
  misc_feature 1..22: note = Category: DNA sequence of FAS target site
  source 1..22: mol_type = unassigned DNA
gtgtctattagatgctcagagt

SEQ ID NO: 5373 - DNA, 22 bp, unidentified
  misc_feature 1..22: note = Description of Unknown: MG29-1-FAS-target site-G1 sequence
  misc_feature 1..22: note = Category: DNA sequence of FAS target site
  source 1..22: mol_type = unassigned DNA
tgtctattagatgctcagagtg

SEQ ID NO: 5374 - DNA, 22 bp, unidentified
  misc_feature 1..22: note = Description of Unknown: MG29-1-FAS-target site-H1 sequence
  misc_feature 1..22: note = Category: DNA sequence of FAS target site
  source 1..22: mol_type = unassigned DNA
gcatctgtcactgcacttacca

SEQ ID NO: 5375 - DNA, 22 bp, unidentified
  misc_feature 1..22: note = Description of Unknown: MG29-1-FAS-target site-A2 sequence
  misc_feature 1..22: note = Category: DNA sequence of FAS target site
  source 1..22: mol_type = unassigned DNA
catctgtcactgcacttaccac

SEQ ID NO: 5376 - DNA, 22 bp, unidentified
  misc_feature 1..22: note = Description of Unknown: MG29-1-FAS-target site-B2 sequence
  misc_feature 1..22: note = Category: DNA sequence of FAS target site
  source 1..22: mol_type = unassigned DNA
agtagactgttagtgccatgag

SEQ ID NO: 5377 - DNA, 22 bp, unidentified
  misc_feature 1..22: note = Description of Unknown: MG29-1-FAS-target site-C2 sequence
  misc_feature 1..22: note = Category: DNA sequence of FAS target site
  source 1..22: mol_type = unassigned DNA
attttacaggttcttacgtctg

SEQ ID NO: 5378 - DNA, 22 bp, unidentified
  misc_feature 1..22: note = Description of Unknown: MG29-1-FAS-target site-D2 sequence
  misc_feature 1..22: note = Category: DNA sequence of FAS target site
  source 1..22: mol_type = unassigned DNA
ttttacaggttcttacgtctgt

SEQ ID NO: 5379 - DNA, 22 bp, unidentified
  misc_feature 1..22: note = Description of Unknown: MG29-1-FAS-target site-E2 sequence
  misc_feature 1..22: note = Category: DNA sequence of FAS target site
  source 1..22: mol_type = unassigned DNA
acaggttcttacgtctgttgct

SEQ ID NO: 5380 - DNA, 22 bp, unidentified
  misc_feature 1..22: note = Description of Unknown: MG29-1-FAS-target site-F2 sequence
  misc_feature 1..22: note = Category: DNA sequence of FAS target site
  source 1..22: mol_type = unassigned DNA
caggttcttacgtctgttgcta

SEQ ID NO: 5381 - DNA, 22 bp, unidentified
  misc_feature 1..22: note = Description of Unknown: MG29-1-FAS-target site-G2 sequence
  misc_feature 1..22: note = Category: DNA sequence of FAS target site
  source 1..22: mol_type = unassigned DNA
gtgtaacatacctggaggacag

SEQ ID NO: 5382 - DNA, 22 bp, unidentified
  misc_feature 1..22: note = Description of Unknown: MG29-1-FAS-target site-H2 sequence
  misc_feature 1..22: note = Category: DNA sequence of FAS target site
  source 1..22: mol_type = unassigned DNA
tgtaacatacctggaggacagg

SEQ ID NO: 5383 - DNA, 22 bp, unidentified
  misc_feature 1..22: note = Description of Unknown: MG29-1-FAS-target site-A3 sequence
  misc_feature 1..22: note = Category: DNA sequence of FAS target site
  source 1..22: mol_type = unassigned DNA
ggacgataatctagcaacagac

SEQ ID NO: 5384 - DNA, 22 bp, unidentified
  misc_feature 1..22: note = Description of Unknown: MG29-1-FAS-target site-B3 sequence
  misc_feature 1..22: note = Category: DNA sequence of FAS target site
  source 1..22: mol_type = unassigned DNA
gacgataatctagcaacagacg

SEQ ID NO: 5385 - DNA, 22 bp, unidentified
  misc_feature 1..22: note = Description of Unknown: MG29-1-FAS-target site-C3 sequence
  misc_feature 1..22: note = Category: DNA sequence of FAS target site
  source 1..22: mol_type = unassigned DNA
ttccttgggcaggtgaaaggaa

SEQ ID NO: 5386 - DNA, 22 bp, unidentified
  misc_feature 1..22: note = Description of Unknown: MG29-1-FAS-target site-D3 sequence
  misc_feature 1..22: note = Category: DNA sequence of FAS target site
  source 1..22: mol_type = unassigned DNA
tccttgggcaggtgaaaggaaa

SEQ ID NO: 5387 - DNA, 22 bp, unidentified
  misc_feature 1..22: note = Description of Unknown: MG29-1-FAS-target site-E3 sequence
  misc_feature 1..22: note = Category: DNA sequence of FAS target site
  source 1..22: mol_type = unassigned DNA
ccttgggcaggtgaaaggaaag

SEQ ID NO: 5388 - DNA, 22 bp, unidentified
  misc_feature 1..22: note = Description of Unknown: MG29-1-FAS-target site-F3 sequence
  misc_feature 1..22: note = Category: DNA sequence of FAS target site
  source 1..22: mol_type = unassigned DNA
cttgggcaggtgaaaggaaagc

SEQ ID NO: 5389 - DNA, 22 bp, unidentified
  misc_feature 1..22: note = Description of Unknown: MG29-1-FAS-target site-G3 sequence
  misc_feature 1..22: note = Category: DNA sequence of FAS target site
  source 1..22: mol_type = unassigned DNA
tcttccaaatgcagaagatgta

SEQ ID NO: 5390 - DNA, 22 bp, unidentified
  misc_feature 1..22: note = Description of Unknown: MG29-1-FAS-target site-H3 sequence
  misc_feature 1..22: note = Category: DNA sequence of FAS target site
  source 1..22: mol_type = unassigned DNA
cttccaaatgcagaagatgtag

SEQ ID NO: 5391 - DNA, 22 bp, unidentified
  misc_feature 1..22: note = Description of Unknown: MG29-1-FAS-target site-A4 sequence
  misc_feature 1..22: note = Category: DNA sequence of FAS target site
  source 1..22: mol_type = unassigned DNA
ttccaaatgcagaagatgtaga

SEQ ID NO: 5392 - DNA, 22 bp, unidentified
  misc_feature 1..22: note = Description of Unknown: MG29-1-FAS-target site-B4 sequence
  misc_feature 1..22: note = Category: DNA sequence of FAS target site
  source 1..22: mol_type = unassigned DNA
aagactcttaccatgtccttca

SEQ ID NO: 5393 - DNA, 22 bp, unidentified
  misc_feature 1..22: note = Description of Unknown: MG29-1-FAS-target site-C4 sequence
  misc_feature 1..22: note = Category: DNA sequence of FAS target site
  source 1..22: mol_type = unassigned DNA
agactcttaccatgtccttcat

SEQ ID NO: 5394 - DNA, 22 bp, unidentified
  misc_feature 1..22: note = Description of Unknown: MG29-1-FAS-target site-D4 sequence
  misc_feature 1..22: note = Category: DNA sequence of FAS target site
  source 1..22: mol_type = unassigned DNA
gaagaaaaatgggctttgtctg

SEQ ID NO: 5395 - DNA, 22 bp, unidentified
  misc_feature 1..22: note = Description of Unknown: MG29-1-FAS-target site-E4 sequence
  misc_feature 1..22: note = Category: DNA sequence of FAS target site
  source 1..22: mol_type = unassigned DNA
tctgtgtactccttcccttctt

SEQ ID NO: 5396 - DNA, 22 bp, unidentified
  misc_feature 1..22: note = Description of Unknown: MG29-1-FAS-target site-F4 sequence
  misc_feature 1..22: note = Category: DNA sequence of FAS target site
  source 1..22: mol_type = unassigned DNA
caaactgattttctaggcttag

SEQ ID NO: 5397 - DNA, 22 bp, unidentified
  misc_feature 1..22: note = Description of Unknown: MG29-1-FAS-target site-G4 sequence
  misc_feature 1..22: note = Category: DNA sequence of FAS target site
  source 1..22: mol_type = unassigned DNA
ctaggcttagaagtggaaataa

SEQ ID NO: 5398 - DNA, 22 bp, unidentified
  misc_feature 1..22: note = Description of Unknown: MG29-1-FAS-target site-H4 sequence
  misc_feature 1..22: note = Category: DNA sequence of FAS target site
  source 1..22: mol_type = unassigned DNA
taggcttagaagtggaaataaa

SEQ ID NO: 5399 - DNA, 22 bp, unidentified
  misc_feature 1..22: note = Description of Unknown: MG29-1-FAS-target site-A5 sequence
  misc_feature 1..22: note = Category: DNA sequence of FAS target site
  source 1..22: mol_type = unassigned DNA
tttgtaactctactgtatgtga

SEQ ID NO: 5400 - DNA, 22 bp, unidentified
  misc_feature 1..22: note = Description of Unknown: MG29-1-FAS-target site-B5 sequence
  misc_feature 1..22: note = Category: DNA sequence of FAS target site
  source 1..22: mol_type = unassigned DNA
ttgtaactctactgtatgtgaa

SEQ ID NO: 5401 - DNA, 22 bp, unidentified
  misc_feature 1..22: note = Description of Unknown: MG29-1-FAS-target site-C5 sequence
  misc_feature 1..22: note = Category: DNA sequence of FAS target site
  source 1..22: mol_type = unassigned DNA
tgtaactctactgtatgtgaac

SEQ ID NO: 5402 - DNA, 22 bp, unidentified
  misc_feature 1..22: note = Description of Unknown: MG29-1-FAS-target site-D5 sequence
  misc_feature 1..22: note = Category: DNA sequence of FAS target site
  source 1..22: mol_type = unassigned DNA
gtaactctactgtatgtgaaca

SEQ ID NO: 5403 - DNA, 22 bp, unidentified
  misc_feature 1..22: note = Description of Unknown: MG29-1-FAS-target site-E5 sequence
  misc_feature 1..22: note = Category: DNA sequence of FAS target site
  source 1..22: mol_type = unassigned DNA
taactctactgtatgtgaacac

SEQ ID NO: 5404 - DNA, 22 bp, unidentified
  misc_feature 1..22: note = Description of Unknown: MG29-1-FAS-target site-F5 sequence
  misc_feature 1..22: note = Category: DNA sequence of FAS target site
  source 1..22: mol_type = unassigned DNA
gtttacatctgcacttggtatt

SEQ ID NO: 5405 - DNA, 22 bp, unidentified
  misc_feature 1..22: note = Description of Unknown: MG29-1-FAS-target site-G5 sequence
  misc_feature 1..22: note = Category: DNA sequence of FAS target site
  source 1..22: mol_type = unassigned DNA
catctgcacttggtattctggg

SEQ ID NO: 5406 - DNA, 22 bp, unidentified
  misc_feature 1..22: note = Description of Unknown: MG29-1-FAS-target site-H5 sequence
  misc_feature 1..22: note = Category: DNA sequence of FAS target site
  source 1..22: mol_type = unassigned DNA
tcctgtatttttttttctagat

SEQ ID NO: 5407 - DNA, 22 bp, unidentified
  misc_feature 1..22: note = Description of Unknown: MG29-1-FAS-target site-A6 sequence
  misc_feature 1..22: note = Category: DNA sequence of FAS target site
  source 1..22: mol_type = unassigned DNA
tttttctagatgtgaacatgga

SEQ ID NO: 5408 - DNA, 22 bp, unidentified
  misc_feature 1..22: note = Description of Unknown: MG29-1-FAS-target site-B6 sequence
  misc_feature 1..22: note = Category: DNA sequence of FAS target site
  source 1..22: mol_type = unassigned DNA
ttttctagatgtgaacatggaa

SEQ ID NO: 5409 - DNA, 22 bp, unidentified
  misc_feature 1..22: note = Description of Unknown: MG29-1-FAS-target site-C6 sequence
  misc_feature 1..22: note = Category: DNA sequence of FAS target site
  source 1..22: mol_type = unassigned DNA
tttctagatgtgaacatggaat

SEQ ID NO: 5410 - DNA, 22 bp, unidentified
  misc_feature 1..22: note = Description of Unknown: MG29-1-FAS-target site-D6 sequence
  misc_feature 1..22: note = Category: DNA sequence of FAS target site
  source 1..22: mol_type = unassigned DNA
ttctagatgtgaacatggaatc

SEQ ID NO: 5411 - DNA, 22 bp, unidentified
  misc_feature 1..22: note = Description of Unknown: MG29-1-FAS-target site-E6 sequence
  misc_feature 1..22: note = Category: DNA sequence of FAS target site
  source 1..22: mol_type = unassigned DNA
tctagatgtgaacatggaatca

SEQ ID NO: 5412 - DNA, 22 bp, unidentified
  misc_feature 1..22: note = Description of Unknown: MG29-1-FAS-target site-F6 sequence
  misc_feature 1..22: note = Category: DNA sequence of FAS target site
  source 1..22: mol_type = unassigned DNA
ctagatgtgaacatggaatcat

SEQ ID NO: 5413 - DNA, 22 bp, unidentified
  misc_feature 1..22: note = Description of Unknown: MG29-1-FAS-target site-G6 sequence
  misc_feature 1..22: note = Category: DNA sequence of FAS target site
  source 1..22: mol_type = unassigned DNA
tagatgtgaacatggaatcatc

SEQ ID NO: 5414 - DNA, 22 bp, unidentified
  misc_feature 1..22: note = Description of Unknown: MG29-1-FAS-target site-H6 sequence
  misc_feature 1..22: note = Category: DNA sequence of FAS target site
  source 1..22: mol_type = unassigned DNA
cacttggtgttgctggtgagtg

SEQ ID NO: 5415 - DNA, 22 bp, unidentified
  misc_feature 1..22: note = Description of Unknown: MG29-1-FAS-target site-A7 sequence
  misc_feature 1..22: note = Category: DNA sequence of FAS target site
  source 1..22: mol_type = unassigned DNA
tcttcttcttttgccaattcca

SEQ ID NO: 5416 - DNA, 22 bp, unidentified
  misc_feature 1..22: note = Description of Unknown: MG29-1-FAS-target site-B7 sequence
  misc_feature 1..22: note = Category: DNA sequence of FAS target site
  source 1..22: mol_type = unassigned DNA
gccaattccactaattgtttgg

SEQ ID NO: 5417 - DNA, 22 bp, unidentified
  misc_feature 1..22: note = Description of Unknown: MG29-1-FAS-target site-C7 sequence
  misc_feature 1..22: note = Category: DNA sequence of FAS target site
  source 1..22: mol_type = unassigned DNA
ccaattccactaattgtttggg

SEQ ID NO: 5418 - DNA, 22 bp, unidentified
  misc_feature 1..22: note = Description of Unknown: MG29-1-FAS-target site-D7 sequence
  misc_feature 1..22: note = Category: DNA sequence of FAS target site
  source 1..22: mol_type = unassigned DNA
aacaaagcaagaacttacccca

SEQ ID NO: 5419 - DNA, 22 bp, unidentified
  misc_feature 1..22: note = Description of Unknown: MG29-1-FAS-target site-E7 sequence
  misc_feature 1..22: note = Category: DNA sequence of FAS target site
  source 1..22: mol_type = unassigned DNA
tttgttctttcagtgaagagaa

SEQ ID NO: 5420 - DNA, 22 bp, unidentified
  misc_feature 1..22: note = Description of Unknown: MG29-1-FAS-target site-F7 sequence
  misc_feature 1..22: note = Category: DNA sequence of FAS target site
  source 1..22: mol_type = unassigned DNA
ttctttcagtgaagagaaagga

SEQ ID NO: 5421 - DNA, 22 bp, unidentified
  misc_feature 1..22: note = Description of Unknown: MG29-1-FAS-target site-G7 sequence
  misc_feature 1..22: note = Category: DNA sequence of FAS target site
  source 1..22: mol_type = unassigned DNA
agtgaagagaaaggaagtacag

SEQ ID NO: 5422 - DNA, 22 bp, unidentified
  misc_feature 1..22: note = Description of Unknown: MG29-1-FAS-target site-H7 sequence
  misc_feature 1..22: note = Category: DNA sequence of FAS target site
  source 1..22: mol_type = unassigned DNA
aatacctacaggatttaaagtt

SEQ ID NO: 5423 - DNA, 22 bp, unidentified
  misc_feature 1..22: note = Description of Unknown: MG29-1-FAS-target site-A8 sequence
  misc_feature 1..22: note = Category: DNA sequence of FAS target site
  source 1..22: mol_type = unassigned DNA
aagttggagattcatgagaacc

SEQ ID NO: 5424 - DNA, 22 bp, unidentified
  misc_feature 1..22: note = Description of Unknown: MG29-1-FAS-target site-B8 sequence
  misc_feature 1..22: note = Category: DNA sequence of FAS target site
  source 1..22: mol_type = unassigned DNA
cctttctgtgctttctgcatgt

SEQ ID NO: 5425 - DNA, 22 bp, unidentified
  misc_feature 1..22: note = Description of Unknown: MG29-1-FAS-target site-C8 sequence
  misc_feature 1..22: note = Category: DNA sequence of FAS target site
  source 1..22: mol_type = unassigned DNA
ctttctgtgctttctgcatgtt

SEQ ID NO: 5426 - DNA, 22 bp, unidentified
  misc_feature 1..22: note = Description of Unknown: MG29-1-FAS-target site-D8 sequence
  misc_feature 1..22: note = Category: DNA sequence of FAS target site
  source 1..22: mol_type = unassigned DNA
tgtgctttctgcatgttttctg

SEQ ID NO: 5427 - DNA, 22 bp, unidentified
  misc_feature 1..22: note = Description of Unknown: MG29-1-FAS-target site-E8 sequence
  misc_feature 1..22: note = Category: DNA sequence of FAS target site
  source 1..22: mol_type = unassigned DNA
tgcatgttttctgtacttcctt

SEQ ID NO: 5428 - DNA, 22 bp, unidentified
  misc_feature 1..22: note = Description of Unknown: MG29-1-FAS-target site-F8 sequence
  misc_feature 1..22: note = Category: DNA sequence of FAS target site
  source 1..22: mol_type = unassigned DNA
ctgtacttcctttctcttcact

SEQ ID NO: 5429 - DNA, 22 bp, unidentified
  misc_feature 1..22: note = Description of Unknown: MG29-1-FAS-target site-G8 sequence
  misc_feature 1..22: note = Category: DNA sequence of FAS target site
  source 1..22: mol_type = unassigned DNA
ttgctttctaggaaacagtggc

SEQ ID NO: 5430 - DNA, 22 bp, unidentified
  misc_feature 1..22: note = Description of Unknown: MG29-1-FAS-target site-H8 sequence
  misc_feature 1..22: note = Category: DNA sequence of FAS target site
  source 1..22: mol_type = unassigned DNA
tgctttctaggaaacagtggca

SEQ ID NO: 5431 - DNA, 22 bp, unidentified
  misc_feature 1..22: note = Description of Unknown: MG29-1-FAS-target site-A9 sequence
  misc_feature 1..22: note = Category: DNA sequence of FAS target site
  source 1..22: mol_type = unassigned DNA
gctttctaggaaacagtggcaa

SEQ ID NO: 5432 - DNA, 22 bp, unidentified
  misc_feature 1..22: note = Description of Unknown: MG29-1-FAS-target site-B9 sequence
  misc_feature 1..22: note = Category: DNA sequence of FAS target site
  source 1..22: mol_type = unassigned DNA
ctttctaggaaacagtggcaat

SEQ ID NO: 5433 - DNA, 22 bp, unidentified
  misc_feature 1..22: note = Description of Unknown: MG29-1-FAS-target site-C9 sequence
  misc_feature 1..22: note = Category: DNA sequence of FAS target site
  source 1..22: mol_type = unassigned DNA
taggaaacagtggcaataaatt

SEQ ID NO: 5434 - DNA, 22 bp, unidentified
  misc_feature 1..22: note = Description of Unknown: MG29-1-FAS-target site-D9 sequence
  misc_feature 1..22: note = Category: DNA sequence of FAS target site
  source 1..22: mol_type = unassigned DNA
agactattttctatttttcaga

SEQ ID NO: 5435 - DNA, 22 bp, unidentified
  misc_feature 1..22: note = Description of Unknown: MG29-1-FAS-target site-E9 sequence
  misc_feature 1..22: note = Category: DNA sequence of FAS target site
  source 1..22: mol_type = unassigned DNA
ctatttttcagatgttgacttg

SEQ ID NO: 5436 - DNA, 22 bp, unidentified
  misc_feature 1..22: note = Description of Unknown: MG29-1-FAS-target site-F9 sequence
  misc_feature 1..22: note = Category: DNA sequence of FAS target site
  source 1..22: mol_type = unassigned DNA
tatttttcagatgttgacttga

SEQ ID NO: 5437 - DNA, 22 bp, unidentified
  misc_feature 1..22: note = Description of Unknown: MG29-1-FAS-target site-G9 sequence
  misc_feature 1..22: note = Category: DNA sequence of FAS target site
  source 1..22: mol_type = unassigned DNA
tcagatgttgacttgagtaaat

SEQ ID NO: 5438 - DNA, 22 bp, unidentified
  misc_feature 1..22: note = Description of Unknown: MG29-1-FAS-target site-H9 sequence
  misc_feature 1..22: note = Category: DNA sequence of FAS target site
  source 1..22: mol_type = unassigned DNA
cagatgttgacttgagtaaata

SEQ ID NO: 5439 - DNA, 22 bp, unidentified
  misc_feature 1..22: note = Description of Unknown: MG29-1-FAS-target site-A10 sequence
  misc_feature 1..22: note = Category: DNA sequence of FAS target site
  source 1..22: mol_type = unassigned DNA
agatgttgacttgagtaaatat

SEQ ID NO: 5440 - DNA, 22 bp, unidentified
  misc_feature 1..22: note = Description of Unknown: MG29-1-FAS-target site-B10 sequence
  misc_feature 1..22: note = Category: DNA sequence of FAS target site
  source 1..22: mol_type = unassigned DNA
ttcgaaagaatggtgtcaatga

SEQ ID NO: 5441 - DNA, 22 bp, unidentified
  misc_feature 1..22: note = Description of Unknown: MG29-1-FAS-target site-C10 sequence
  misc_feature 1..22: note = Category: DNA sequence of FAS target site
  source 1..22: mol_type = unassigned DNA
tactcttgcagagaaaattcag

SEQ ID NO: 5442 - DNA, 22 bp, unidentified
  misc_feature 1..22: note = Description of Unknown: MG29-1-FAS-target site-D10 sequence
  misc_feature 1..22: note = Category: DNA sequence of FAS target site
  source 1..22: mol_type = unassigned DNA
ttgtttttcactctagaccaag

SEQ ID NO: 5443 - DNA, 22 bp, unidentified
  misc_feature 1..22: note = Description of Unknown: MG29-1-FAS-target site-E10 sequence
  misc_feature 1..22: note = Category: DNA sequence of FAS target site
  source 1..22: mol_type = unassigned DNA
tcactctagaccaagctttgga

SEQ ID NO: 5444 - DNA, 22 bp, unidentified
  misc_feature 1..22: note = Description of Unknown: MG29-1-FAS-target site-F10 sequence
  misc_feature 1..22: note = Category: DNA sequence of FAS target site
  source 1..22: mol_type = unassigned DNA
cactctagaccaagctttggat

SEQ ID NO: 5445 - DNA, 22 bp, unidentified
  misc_feature 1..22: note = Description of Unknown: MG29-1-FAS-target site-G10 sequence
  misc_feature 1..22: note = Category: DNA sequence of FAS target site
  source 1..22: mol_type = unassigned DNA
actctagaccaagctttggatt

SEQ ID NO: 5446 - DNA, 22 bp, unidentified
  misc_feature 1..22: note = Description of Unknown: MG29-1-FAS-target site-H10 sequence
  misc_feature 1..22: note = Category: DNA sequence of FAS target site
  source 1..22: mol_type = unassigned DNA
gatttcatttctgaagtttgaa

SEQ ID NO: 5447 - DNA, 22 bp, unidentified
  misc_feature 1..22: note = Description of Unknown: MG29-1-FAS-target site-A11 sequence
  misc_feature 1..22: note = Category: DNA sequence of FAS target site
  source 1..22: mol_type = unassigned DNA
atttctgaagtttgaattttct

SEQ ID NO: 5448 - DNA, 22 bp, unidentified
  misc_feature 1..22: note = Description of Unknown: MG29-1-FAS-target site-B11 sequence
  misc_feature 1..22: note = Category: DNA sequence of FAS target site
  source 1..22: mol_type = unassigned DNA
tgaagtttgaattttctgagtc

SEQ ID NO: 5449 - DNA, 22 bp, unidentified
  misc_feature 1..22: note = Description of Unknown: MG29-1-FAS-target site-C11 sequence
  misc_feature 1..22: note = Category: DNA sequence of FAS target site
  source 1..22: mol_type = unassigned DNA
aattttctgagtcactagtaat

SEQ ID NO: 5450 - DNA, 22 bp, unidentified
  misc_feature 1..22: note = Description of Unknown: MG29-1-FAS-target site-D11 sequence
  misc_feature 1..22: note = Category: DNA sequence of FAS target site
  source 1..22: mol_type = unassigned DNA
ctgagtcactagtaatgtcctt

SEQ ID NO: 5451 - DNA, 22 bp, unidentified
  misc_feature 1..22: note = Description of Unknown: MG29-1-FAS-target site-E11 sequence
  misc_feature 1..22: note = Category: DNA sequence of FAS target site
  source 1..22: mol_type = unassigned DNA
tgagtcactagtaatgtccttg

SEQ ID NO: 5452 - DNA, 22 bp, unidentified
  misc_feature 1..22: note = Description of Unknown: MG29-1-FAS-target site-F11 sequence
  misc_feature 1..22: note = Category: DNA sequence of FAS target site
  source 1..22: mol_type = unassigned DNA
ctctgcaagagtacaaagattg

SEQ ID NO: 5453 - DNA, 22 bp, unidentified
  misc_feature 1..22: note = Description of Unknown: MG29-1-FAS-target site-G11 sequence
  misc_feature 1..22: note = Category: DNA sequence of FAS target site
  source 1..22: mol_type = unassigned DNA
tctgcaagagtacaaagattgg

SEQ ID NO: 5454 - DNA, 22 bp, unidentified
  misc_feature 1..22: note = Description of Unknown: MG29-1-FAS-target site-H11 sequence
  misc_feature 1..22: note = Category: DNA sequence of FAS target site
  source 1..22: mol_type = unassigned DNA
ttgagatctttaatcaatgtgt

SEQ ID NO: 5455 - DNA, 22 bp, unidentified
  misc_feature 1..22: note = Description of Unknown: MG29-1-FAS-target site-A12 sequence
  misc_feature 1..22: note = Category: DNA sequence of FAS target site
  source 1..22: mol_type = unassigned DNA
tgagatctttaatcaatgtgtc

SEQ ID NO: 5456 - DNA, 22 bp, unidentified
  misc_feature 1..22: note = Description of Unknown: MG29-1-FAS-target site-B12 sequence
  misc_feature 1..22: note = Category: DNA sequence of FAS target site
  source 1..22: mol_type = unassigned DNA
gagatctttaatcaatgtgtca

SEQ ID NO: 5457 - DNA, 22 bp, unidentified
  misc_feature 1..22: note = Description of Unknown: MG29-1-FAS-target site-C12 sequence
  misc_feature 1..22: note = Category: DNA sequence of FAS target site
  source 1..22: mol_type = unassigned DNA
agatctttaatcaatgtgtcat

SEQ ID NO: 5458 - DNA, 22 bp, unidentified
  misc_feature 1..22: note = Description of Unknown: MG29-1-FAS-target site-D12 sequence
  misc_feature 1..22: note = Category: DNA sequence of FAS target site
  source 1..22: mol_type = unassigned DNA
atcaatgtgtcatacgcttctt

SEQ ID NO: 5459 - DNA, 22 bp, unidentified
  misc_feature 1..22: note = Description of Unknown: MG29-1-FAS-target site-E12 sequence
  misc_feature 1..22: note = Category: DNA sequence of FAS target site
  source 1..22: mol_type = unassigned DNA
tttccatgaagttgatgccaat

SEQ ID NO: 5460 - DNA, 22 bp, unidentified
  misc_feature 1..22: note = Description of Unknown: MG29-1-FAS-target site-F12 sequence
  misc_feature 1..22: note = Category: DNA sequence of FAS target site
  source 1..22: mol_type = unassigned DNA
catgaagttgatgccaattacg

SEQ ID NO: 5461 - DNA, 22 bp, unidentified
  misc_feature 1..22: note = Description of Unknown: MG29-1-FAS-target site-G12 sequence
  misc_feature 1..22: note = Category: DNA sequence of FAS target site
  source 1..22: mol_type = unassigned DNA
tgttctgctgtgtcttggacat

SEQ ID NO: 5462 - DNA, 22 bp, unidentified
  misc_feature 1..22: note = Description of Unknown: MG29-1-FAS-target site-H12 sequence
  misc_feature 1..22: note = Category: DNA sequence of FAS target site
  source 1..22: mol_type = unassigned DNA
ggcttcattgacaccattcttt

SEQ ID NO: 5463 - DNA, 22 bp, unidentified
  misc_feature 1..22: note = Description of Unknown: MG29-1-FAS-target site-A13 sequence
  misc_feature 1..22: note = Category: DNA sequence of FAS target site
  source 1..22: mol_type = unassigned DNA
gcttcattgacaccattctttc

SEQ ID NO: 5464 - DNA, 22 bp, unidentified
  misc_feature 1..22: note = Description of Unknown: MG29-1-FAS-target site-B13 sequence
  misc_feature 1..22: note = Category: DNA sequence of FAS target site
  source 1..22: mol_type = unassigned DNA
gaacaaagcctttaacttgact

SEQ ID NO: 5465 - DNA, 22 bp, unidentified
  misc_feature 1..22: note = Description of Unknown: MG29-1-FAS-target site-C13 sequence
  misc_feature 1..22: note = Category: DNA sequence of FAS target site
  source 1..22: mol_type = unassigned DNA
acttgacttagtgtcatgactc

SEQ ID NO: 5466 - RNA, 42 nt, synthetic construct
  misc_feature 1..42: note = Description of Artificial Sequence: Synthetic oligonucleotide
  misc_feature 1..42: note = Category: MG29-1 sgRNA targeting PD-1
  misc_feature 1..42: note = Description: MG29-1-PD-1-sgRNA-A1
  source 1..42: mol_type = other RNA
taatttctactgttgtagatctagcggaatgggcacctcatc

SEQ ID NO: 5467 - RNA, 42 nt, synthetic construct
  misc_feature 1..42: note = Description of Artificial Sequence: Synthetic oligonucleotide
  misc_feature 1..42: note = Category: MG29-1 sgRNA targeting PD-1
  misc_feature 1..42: note = Description: MG29-1-PD-1-sgRNA-B1
  source 1..42: mol_type = other RNA
taatttctactgttgtagatcagtggcgagagaagaccccgg

SEQ ID NO: 5468 - RNA, 42 nt, synthetic construct
  misc_feature 1..42: note = Description of Artificial Sequence: Synthetic oligonucleotide
  misc_feature 1..42: note = Category: MG29-1 sgRNA targeting PD-1
  misc_feature 1..42: note = Description: MG29-1-PD-1-sgRNA-C1
  source 1..42: mol_type = other RNA
taatttctactgttgtagattcctcaaagaaggaggacccct

SEQ ID NO: 5469 - RNA, 42 nt, synthetic construct
  misc_feature 1..42: note = Description of Artificial Sequence: Synthetic oligonucleotide
  misc_feature 1..42: note = Category: MG29-1 sgRNA targeting PD-1
  misc_feature 1..42: note = Description: MG29-1-PD-1-sgRNA-D1
  source 1..42: mol_type = other RNA
taatttctactgttgtagattctgcagggacaataggagcca

SEQ ID NO: 5470 - RNA, 42 nt, synthetic construct
  misc_feature 1..42: note = Description of Artificial Sequence: Synthetic oligonucleotide
  misc_feature 1..42: note = Category: MG29-1 sgRNA targeting PD-1
  misc_feature 1..42: note = Description: MG29-1-PD-1-sgRNA-E1
  source 1..42: mol_type = other RNA
taatttctactgttgtagatgaactggccggctggcctgggt

SEQ ID NO: 5471 - RNA, 42 nt, synthetic construct
  misc_feature 1..42: note = Description of Artificial Sequence: Synthetic oligonucleotide
  misc_feature 1..42: note = Category: MG29-1 sgRNA targeting PD-1
  misc_feature 1..42: note = Description: MG29-1-PD-1-sgRNA-F1
  source 1..42: mol_type = other RNA
taatttctactgttgtagattgcccttccagagagaagggca

SEQ ID NO: 5472 - RNA, 42 nt, synthetic construct
  misc_feature 1..42: note = Description of Artificial Sequence: Synthetic oligonucleotide
  misc_feature 1..42: note = Category: MG29-1 sgRNA targeting PD-1
  misc_feature 1..42: note = Description: MG29-1-PD-1-sgRNA-G1
  source 1..42: mol_type = other RNA
taatttctactgttgtagatatctgcgccttgggggccaggg

SEQ ID NO: 5473 - RNA, 42 nt, synthetic construct
  misc_feature 1..42: note = Description of Artificial Sequence: Synthetic oligonucleotide
  misc_feature 1..42: note = Category: MG29-1 sgRNA targeting PD-1
  misc_feature 1..42: note = Description: MG29-1-PD-1-sgRNA-H1
  source 1..42: mol_type = other RNA
taatttctactgttgtagatgcacgaagctctccgatgtgtt

SEQ ID NO: 5474 - DNA, 22 bp, unidentified
  misc_feature 1..22: note = Description of Unknown: MG29-1-PD-1-target site-A1 sequence
  misc_feature 1..22: note = Category: DNA sequence of PD-1 target site
  source 1..22: mol_type = unassigned DNA
atctgcgccttgggggccaggg

SEQ ID NO: 5475 - DNA, 22 bp, unidentified
  misc_feature 1..22: note = Description of Unknown: MG29-1-PD-1-target site-B1 sequence
  misc_feature 1..22: note = Category: DNA sequence of PD-1 target site
  source 1..22: mol_type = unassigned DNA
gcacgaagctctccgatgtgtt

SEQ ID NO: 5476 - DNA, 22 bp, unidentified
  misc_feature 1..22: note = Description of Unknown: MG29-1-PD-1-target site-C1 sequence
  misc_feature 1..22: note = Category: DNA sequence of PD-1 target site
  source 1..22: mol_type = unassigned DNA
gaactggccggctggcctgggt

SEQ ID NO: 5477 - DNA, 22 bp, unidentified
  misc_feature 1..22: note = Description of Unknown: MG29-1-PD-1-target site-D1 sequence
  misc_feature 1..22: note = Category: DNA sequence of PD-1 target site
  source 1..22: mol_type = unassigned DNA
tgcccttccagagagaagggca

SEQ ID NO: 5478 - DNA, 22 bp, unidentified
  misc_feature 1..22: note = Description of Unknown: MG29-1-PD-1-target site-E1 sequence
  misc_feature 1..22: note = Category: DNA sequence of PD-1 target site
  source 1..22: mol_type = unassigned DNA
tctgcagggacaataggagcca

SEQ ID NO: 5479 - DNA, 22 bp, unidentified
  misc_feature 1..22: note = Description of Unknown: MG29-1-PD-1-target site-F1 sequence
  misc_feature 1..22: note = Category: DNA sequence of PD-1 target site
  source 1..22: mol_type = unassigned DNA
tcctcaaagaaggaggacccct

SEQ ID NO: 5480 - DNA, 22 bp, unidentified
  misc_feature 1..22: note = Description of Unknown: MG29-1-PD-1-target site-G1 sequence
  misc_feature 1..22: note = Category: DNA sequence of PD-1 target site
  source 1..22: mol_type = unassigned DNA
cagtggcgagagaagaccccgg

SEQ ID NO: 5481 - DNA, 22 bp, unidentified
  misc_feature 1..22: note = Description of Unknown: MG29-1-PD-1-target site-H1 sequence
  misc_feature 1..22: note = Category: DNA sequence of PD-1 target site
  source 1..22: mol_type = unassigned DNA
ctagcggaatgggcacctcatc

SEQ ID NO: 5482 - RNA, 42 nt, synthetic construct
  misc_feature 1..42: note = Description of Artificial Sequence: Synthetic oligonucleotide
  misc_feature 1..42: note = Category: MG29-1 sgRNA targeting HPRT
  misc_feature 1..42: note = Description: MG29-1-HPRT-sgRNA-A1
  source 1..42: mol_type = other RNA
taatttctactgttgtagattctccctggcttacctttagga

SEQ ID NO: 5483 - RNA, 42 nt, synthetic construct
  misc_feature 1..42: note = Description of Artificial Sequence: Synthetic oligonucleotide
  misc_feature 1..42: note = Category: MG29-1 sgRNA targeting HPRT
  misc_feature 1..42: note = Description: MG29-1-HPRT-sgRNA-B1
  source 1..42: mol_type = other RNA
taatttctactgttgtagatgaacacaagcccaccattaaaa

SEQ ID NO: 5484 - RNA, 42 nt, synthetic construct
  misc_feature 1..42: note = Description of Artificial Sequence: Synthetic oligonucleotide
  misc_feature 1..42: note = Category: MG29-1 sgRNA targeting HPRT
  misc_feature 1..42: note = Description: MG29-1-HPRT-sgRNA-C1
  source 1..42: mol_type = other RNA
taatttctactgttgtagataatggtgggcttgtgttctaaa

SEQ ID NO: 5485 - RNA, 42 nt, synthetic construct
  misc_feature 1..42: note = Description of Artificial Sequence: Synthetic oligonucleotide
  misc_feature 1..42: note = Category: MG29-1 sgRNA targeting HPRT
  misc_feature 1..42: note = Description: MG29-1-HPRT-sgRNA-D1
  source 1..42: mol_type = other RNA
taatttctactgttgtagatatggtgggcttgtgttctaaag

SEQ ID NO: 5486 - RNA, 42 nt, synthetic construct
  misc_feature 1..42: note = Description of Artificial Sequence: Synthetic oligonucleotide
  misc_feature 1..42: note = Category: MG29-1 sgRNA targeting HPRT
  misc_feature 1..42: note = Description: MG29-1-HPRT-sgRNA-E1
  source 1..42: mol_type = other RNA
taatttctactgttgtagatccctaacaaagatgggtttgtt

SEQ ID NO: 5487 - RNA, 42 nt, synthetic construct
  misc_feature 1..42: note = Description of Artificial Sequence: Synthetic oligonucleotide
  misc_feature 1..42: note = Category: MG29-1 sgRNA targeting HPRT
  misc_feature 1..42: note = Description: MG29-1-HPRT-sgRNA-F1
  source 1..42: mol_type = other RNA
taatttctactgttgtagataaggcacccaaattaataacgc

SEQ ID NO: 5488 - RNA, 42 nt, synthetic construct
  misc_feature 1..42: note = Description of Artificial Sequence: Synthetic oligonucleotide
  misc_feature 1..42: note = Category: MG29-1 sgRNA targeting HPRT
  misc_feature 1..42: note = Description: MG29-1-HPRT-sgRNA-G1
  source 1..42: mol_type = other RNA
taatttctactgttgtagattagcgttattaatttgggtgcc

SEQ ID NO: 5489 - RNA, 42 nt, synthetic construct
  misc_feature 1..42: note = Description of Artificial Sequence: Synthetic oligonucleotide
  misc_feature 1..42: note = Category: MG29-1 sgRNA targeting HPRT
  misc_feature 1..42: note = Description: MG29-1-HPRT-sgRNA-H1
  source 1..42: mol_type = other RNA
taatttctactgttgtagattcgagtgtagtctgttagccac

SEQ ID NO: 5490 - RNA, 42 nt, synthetic construct
  misc_feature 1..42: note = Description of Artificial Sequence: Synthetic oligonucleotide
  misc_feature 1..42: note = Category: MG29-1 sgRNA targeting HPRT
  misc_feature 1..42: note = Description: MG29-1-HPRT-sgRNA-A2
  source 1..42: mol_type = other RNA
taatttctactgttgtagatttagggagttatgatgttgtcc

SEQ ID NO: 5491 - RNA, 42 nt, synthetic construct
  misc_feature 1..42: note = Description of Artificial Sequence: Synthetic oligonucleotide
  misc_feature 1..42: note = Category: MG29-1 sgRNA targeting HPRT
  misc_feature 1..42: note = Description: MG29-1-HPRT-sgRNA-B2
  source 1..42: mol_type = other RNA
taatttctactgttgtagattaggtgcaggatcaatgacagc

SEQ ID NO: 5492 - RNA, 42 nt, synthetic construct
  misc_feature 1..42: note = Description of Artificial Sequence: Synthetic oligonucleotide
  misc_feature 1..42: note = Category: MG29-1 sgRNA targeting HPRT
  misc_feature 1..42: note = Description: MG29-1-HPRT-sgRNA-C2
  source 1..42: mol_type = other RNA
taatttctactgttgtagatgtaggtgcaggatcaatgacag

SEQ ID NO: 5493 - RNA, 42 nt, synthetic construct
  misc_feature 1..42: note = Description of Artificial Sequence: Synthetic oligonucleotide
  misc_feature 1..42: note = Category: MG29-1 sgRNA targeting HPRT
  misc_feature 1..42: note = Description: MG29-1-HPRT-sgRNA-D2
  source 1..42: mol_type = other RNA
taatttctactgttgtagatctgtcattgatcctgcacctac

SEQ ID NO: 5494 - RNA, 42 nt, synthetic construct
  misc_feature 1..42: note = Description of Artificial Sequence: Synthetic oligonucleotide
  misc_feature 1..42: note = Category: MG29-1 sgRNA targeting HPRT
  misc_feature 1..42: note = Description: MG29-1-HPRT-sgRNA-E2
  source 1..42: mol_type = other RNA
taatttctactgttgtagatcagcacagtaattctcaccaaa

SEQ ID NO: 5495 - RNA, 42 nt, synthetic construct
  misc_feature 1..42: note = Description of Artificial Sequence: Synthetic oligonucleotide
  misc_feature 1..42: note = Category: MG29-1 sgRNA targeting HPRT
  misc_feature 1..42: note = Description: MG29-1-HPRT-sgRNA-F2
  source 1..42: mol_type = other RNA
taatttctactgttgtagatggtgagaattactgtgctgaaa

SEQ ID NO: 5496 - RNA, 42 nt, synthetic construct
  misc_feature 1..42: note = Description of Artificial Sequence: Synthetic oligonucleotide
  misc_feature 1..42: note = Category: MG29-1 sgRNA targeting HPRT
  misc_feature 1..42: note = Description: MG29-1-HPRT-sgRNA-G2
  source 1..42: mol_type = other RNA
taatttctactgttgtagattcctgaatagcatggcagagga

SEQ ID NO: 5497 - RNA, 42 nt, synthetic construct
  misc_feature 1..42: note = Description of Artificial Sequence: Synthetic oligonucleotide
  misc_feature 1..42: note = Category: MG29-1 sgRNA targeting HPRT
  misc_feature 1..42: note = Description: MG29-1-HPRT-sgRNA-H2
  source 1..42: mol_type = other RNA
taatttctactgttgtagatcaagggggcccaaaatcctctg

SEQ ID NO: 5498 - RNA, 42 nt, synthetic construct
  misc_feature 1..42: note = Description of Artificial Sequence: Synthetic oligonucleotide
  misc_feature 1..42: note = Category: MG29-1 sgRNA targeting HPRT
  misc_feature 1..42: note = Description: MG29-1-HPRT-sgRNA-A3
  source 1..42: mol_type = other RNA
taatttctactgttgtagatgcaagggggcccaaaatcctct

SEQ ID NO: 5499 - RNA, 42 nt, synthetic construct
  misc_feature 1..42: note = Description of Artificial Sequence: Synthetic oligonucleotide
  misc_feature 1..42: note = Category: MG29-1 sgRNA targeting HPRT
  misc_feature 1..42: note = Description: MG29-1-HPRT-sgRNA-B3
  source 1..42: mol_type = other RNA
taatttctactgttgtagatgggcccccttgcaaaattaaga

SEQ ID NO: 5500 - RNA, 42 nt, synthetic construct
  misc_feature 1..42: note = Description of Artificial Sequence: Synthetic oligonucleotide
  misc_feature 1..42: note = Category: MG29-1 sgRNA targeting HPRT
  misc_feature 1..42: note = Description: MG29-1-HPRT-sgRNA-C3
  source 1..42: mol_type = other RNA
taatttctactgttgtagatggcccccttgcaaaattaagaa

SEQ ID NO: 5501 - RNA, 42 nt, synthetic construct
  misc_feature 1..42: note = Description of Artificial Sequence: Synthetic oligonucleotide
  misc_feature 1..42: note = Category: MG29-1 sgRNA targeting HPRT
  misc_feature 1..42: note = Description: MG29-1-HPRT-sgRNA-D3
  source 1..42: mol_type = other RNA
taatttctactgttgtagatactacagacacaaagaagatgc

SEQ ID NO: 5502 - RNA, 42 nt, synthetic construct
  misc_feature 1..42: note = Description of Artificial Sequence: Synthetic oligonucleotide
  misc_feature 1..42: note = Category: MG29-1 sgRNA targeting HPRT
  misc_feature 1..42: note = Description: MG29-1-HPRT-sgRNA-E3
  source 1..42: mol_type = other RNA
taatttctactgttgtagatttattaagtcggcctcacctcc

SEQ ID NO: 5503 - RNA, 42 nt, synthetic construct
  misc_feature 1..42: note = Description of Artificial Sequence: Synthetic oligonucleotide
  misc_feature 1..42: note = Category: MG29-1 sgRNA targeting HPRT
  misc_feature 1..42: note = Description: MG29-1-HPRT-sgRNA-F3
  source 1..42: mol_type = other RNA
taatttctactgttgtagattattaagtcggcctcacctcct

SEQ ID NO: 5504 - RNA, 42 nt, synthetic construct
  misc_feature 1..42: note = Description of Artificial Sequence: Synthetic oligonucleotide
  misc_feature 1..42: note = Category: MG29-1 sgRNA targeting HPRT
  misc_feature 1..42: note = Description: MG29-1-HPRT-sgRNA-G3
  source 1..42: mol_type = other RNA
taatttctactgttgtagatattaagtcggcctcacctcctc

SEQ ID NO: 5505 - RNA, 42 nt, synthetic construct
  misc_feature 1..42: note = Description of Artificial Sequence: Synthetic oligonucleotide
  misc_feature 1..42: note = Category: MG29-1 sgRNA targeting HPRT
  misc_feature 1..42: note = Description: MG29-1-HPRT-sgRNA-H3
  source 1..42: mol_type = other RNA
taatttctactgttgtagatttaagtcggcctcacctcctca

SEQ ID NO: 5506 - RNA, 42 nt, synthetic construct
  misc_feature 1..42: note = Description of Artificial Sequence: Synthetic oligonucleotide
  misc_feature 1..42: note = Category: MG29-1 sgRNA targeting HPRT
  misc_feature 1..42: note = Description: MG29-1-HPRT-sgRNA-A4
  source 1..42: mol_type = other RNA
taatttctactgttgtagattatgtaggggtcaggtaatgtt

SEQ ID NO: 5507 - RNA, 42 nt, synthetic construct
  misc_feature 1..42: note = Description of Artificial Sequence: Synthetic oligonucleotide
  misc_feature 1..42: note = Category: MG29-1 sgRNA targeting HPRT
  misc_feature 1..42: note = Description: MG29-1-HPRT-sgRNA-B4
  source 1..42: mol_type = other RNA
taatttctactgttgtagatatgtaggggtcaggtaatgttc

SEQ ID NO: 5508 - RNA, 42 nt, synthetic construct
  misc_feature 1..42: note = Description of Artificial Sequence: Synthetic oligonucleotide
  misc_feature 1..42: note = Category: MG29-1 sgRNA targeting HPRT
  misc_feature 1..42: note = Description: MG29-1-HPRT-sgRNA-C4
  source 1..42: mol_type = other RNA
taatttctactgttgtagattgtaggggtcaggtaatgttct

SEQ ID NO: 5509 - RNA, 42 nt, synthetic construct
  misc_feature 1..42: note = Description of Artificial Sequence: Synthetic oligonucleotide
  misc_feature 1..42: note = Category: MG29-1 sgRNA targeting HPRT
  misc_feature 1..42: note = Description: MG29-1-HPRT-sgRNA-D4
  source 1..42: mol_type = other RNA
taatttctactgttgtagatgaaaaaatcacggtatctgtcg

SEQ ID NO: 5510 - RNA, 42 nt, synthetic construct
  misc_feature 1..42: note = Description of Artificial Sequence: Synthetic oligonucleotide
  misc_feature 1..42: note = Category: MG29-1 sgRNA targeting HPRT
  misc_feature 1..42: note = Description: MG29-1-HPRT-sgRNA-E4
  source 1..42: mol_type = other RNA
taatttctactgttgtagataatcagagtaagccttctagtg

SEQ ID NO: 5511 - RNA, 42 nt, synthetic construct
  misc_feature 1..42: note = Description of Artificial Sequence: Synthetic oligonucleotide
  misc_feature 1..42: note = Category: MG29-1 sgRNA targeting HPRT
  misc_feature 1..42: note = Description: MG29-1-HPRT-sgRNA-F4
  source 1..42: mol_type = other RNA
taatttctactgttgtagatggacaggtactatgagagtata

SEQ ID NO: 5512 - RNA, 42 nt, synthetic construct
  misc_feature 1..42: note = Description of Artificial Sequence: Synthetic oligonucleotide
  misc_feature 1..42: note = Category: MG29-1 sgRNA targeting HPRT
  misc_feature 1..42: note = Description: MG29-1-HPRT-sgRNA-G4
  source 1..42: mol_type = other RNA
taatttctactgttgtagataaatgtcaacctactgtggcat

SEQ ID NO: 5513 - RNA, 42 nt, synthetic construct
  misc_feature 1..42: note = Description of Artificial Sequence: Synthetic oligonucleotide
  misc_feature 1..42: note = Category: MG29-1 sgRNA targeting HPRT
  misc_feature 1..42: note = Description: MG29-1-HPRT-sgRNA-H4
  source 1..42: mol_type = other RNA
taatttctactgttgtagataatgtcaacctactgtggcata

SEQ ID NO: 5514 - RNA, 42 nt, synthetic construct
  misc_feature 1..42: note = Description of Artificial Sequence: Synthetic oligonucleotide
  misc_feature 1..42: note = Category: MG29-1 sgRNA targeting HPRT
  misc_feature 1..42: note = Description: MG29-1-HPRT-sgRNA-A5
  source 1..42: mol_type = other RNA
taatttctactgttgtagatgttgttctttcctggtatatgc

SEQ ID NO: 5515 - RNA, 42 nt, synthetic construct
  misc_feature 1..42: note = Description of Artificial Sequence: Synthetic oligonucleotide
  misc_feature 1..42: note = Category: MG29-1 sgRNA targeting HPRT
  misc_feature 1..42: note = Description: MG29-1-HPRT-sgRNA-B5
  source 1..42: mol_type = other RNA
taatttctactgttgtagatctggtatatgctgtggaattga

SEQ ID NO: 5516 - RNA, 42 nt, synthetic construct
  misc_feature 1..42: note = Description of Artificial Sequence: Synthetic oligonucleotide
  misc_feature 1..42: note = Category: MG29-1 sgRNA targeting HPRT
  misc_feature 1..42: note = Description: MG29-1-HPRT-sgRNA-C5
  source 1..42: mol_type = other RNA
taatttctactgttgtagatagcatgtcctacctgtggcaac

SEQ ID NO: 5517 - RNA, 42 nt, synthetic construct
  misc_feature 1..42: note = Description of Artificial Sequence: Synthetic oligonucleotide
  misc_feature 1..42: note = Category: MG29-1 sgRNA targeting HPRT
  misc_feature 1..42: note = Description: MG29-1-HPRT-sgRNA-D5
  source 1..42: mol_type = other RNA
taatttctactgttgtagatgtgttgccacaggtaggacatg

SEQ ID NO: 5518 - RNA, 42 nt, synthetic construct
  misc_feature 1..42: note = Description of Artificial Sequence: Synthetic oligonucleotide
  misc_feature 1..42: note = Category: MG29-1 sgRNA targeting HPRT
  misc_feature 1..42: note = Description: MG29-1-HPRT-sgRNA-E5
  source 1..42: mol_type = other RNA
taatttctactgttgtagattgttgccacaggtaggacatgc

SEQ ID NO: 5519 - RNA, 42 nt, synthetic construct
  misc_feature 1..42: note = Description of Artificial Sequence: Synthetic oligonucleotide
  misc_feature 1..42: note = Category: MG29-1 sgRNA targeting HPRT
  misc_feature 1..42: note = Description: MG29-1-HPRT-sgRNA-F5
  source 1..42: mol_type = other RNA
taatttctactgttgtagatcatactgtaaatgggtaaccgt

SEQ ID NO: 5520 - RNA, 42 nt, synthetic construct
  misc_feature 1..42: note = Description of Artificial Sequence: Synthetic oligonucleotide
  misc_feature 1..42: note = Category: MG29-1 sgRNA targeting HPRT
  misc_feature 1..42: note = Description: MG29-1-HPRT-sgRNA-G5
  source 1..42: mol_type = other RNA
taatttctactgttgtagatccatactgtaaatgggtaaccg

SEQ ID NO: 5521 - RNA, 42 nt, synthetic construct
  misc_feature 1..42: note = Description of Artificial Sequence: Synthetic oligonucleotide
  misc_feature 1..42: note = Category: MG29-1 sgRNA targeting HPRT
  misc_feature 1..42: note = Description: MG29-1-HPRT-sgRNA-H5
  source 1..42: mol_type = other RNA
taatttctactgttgtagatataaagctccatctctaaggca

SEQ ID NO: 5522 - RNA, 42 nt, synthetic construct
  misc_feature 1..42: note = Description of Artificial Sequence: Synthetic oligonucleotide
  misc_feature 1..42: note = Category: MG29-1 sgRNA targeting HPRT
  misc_feature 1..42: note = Description: MG29-1-HPRT-sgRNA-A6
  source 1..42: mol_type = other RNA
taatttctactgttgtagatgtgataccttttctggagcatt

SEQ ID NO: 5523 - RNA, 42 nt, synthetic construct
  misc_feature 1..42: note = Description of Artificial Sequence: Synthetic oligonucleotide
  misc_feature 1..42: note = Category: MG29-1 sgRNA targeting HPRT
  misc_feature 1..42: note = Description: MG29-1-HPRT-sgRNA-B6
  source 1..42: mol_type = other RNA
taatttctactgttgtagatctggagcattcctgagttcagg

SEQ ID NO: 5524 - RNA, 42 nt, synthetic construct
  misc_feature 1..42: note = Description of Artificial Sequence: Synthetic oligonucleotide
  misc_feature 1..42: note = Category: MG29-1 sgRNA targeting HPRT
  misc_feature 1..42: note = Description: MG29-1-HPRT-sgRNA-C6
  source 1..42: mol_type = other RNA
taatttctactgttgtagattggagcattcctgagttcaggt

SEQ ID NO: 5525 - RNA, 42 nt, synthetic construct
  misc_feature 1..42: note = Description of Artificial Sequence: Synthetic oligonucleotide
  misc_feature 1..42: note = Category: MG29-1 sgRNA targeting HPRT
  misc_feature 1..42: note = Description: MG29-1-HPRT-sgRNA-D6
  source 1..42: mol_type = other RNA
taatttctactgttgtagattgctgtgattggcttgttatgt

SEQ ID NO: 5526 - RNA, 42 nt, synthetic construct
  misc_feature 1..42: note = Description of Artificial Sequence: Synthetic oligonucleotide
  misc_feature 1..42: note = Category: MG29-1 sgRNA targeting HPRT
  misc_feature 1..42: note = Description: MG29-1-HPRT-sgRNA-E6
  source 1..42: mol_type = other RNA
taatttctactgttgtagatgctgtgattggcttgttatgtt

SEQ ID NO: 5527 - RNA, 42 nt, synthetic construct
  misc_feature 1..42: note = Description of Artificial Sequence: Synthetic oligonucleotide
  misc_feature 1..42: note = Category: MG29-1 sgRNA targeting HPRT
  misc_feature 1..42: note = Description: MG29-1-HPRT-sgRNA-F6
  source 1..42: mol_type = other RNA
taatttctactgttgtagatctgtgattggcttgttatgttc

SEQ ID NO: 5528 - RNA, 42 nt, synthetic construct
  misc_feature 1..42: note = Description of Artificial Sequence: Synthetic oligonucleotide
  misc_feature 1..42: note = Category: MG29-1 sgRNA targeting HPRT
  misc_feature 1..42: note = Description: MG29-1-HPRT-sgRNA-G6
  source 1..42: mol_type = other RNA
taatttctactgttgtagatttggaagagtcatgagggacat

SEQ ID NO: 5529 - RNA, 42 nt, synthetic construct
  misc_feature 1..42: note = Description of Artificial Sequence: Synthetic oligonucleotide
  misc_feature 1..42: note = Category: MG29-1 sgRNA targeting HPRT
  misc_feature 1..42: note = Description: MG29-1-HPRT-sgRNA-H6
  source 1..42: mol_type = other RNA
taatttctactgttgtagatcagatgttaaaggcagtctcaa

SEQ ID NO: 5530 - RNA, 42 nt, synthetic construct
  misc_feature 1..42: note = Description of Artificial Sequence: Synthetic oligonucleotide
  misc_feature 1..42: note = Category: MG29-1 sgRNA targeting HPRT
  misc_feature 1..42: note = Description: MG29-1-HPRT-sgRNA-A7
  source 1..42: mol_type = other RNA
taatttctactgttgtagatcttgagactgcctttaacatct

SEQ ID NO: 5531 - RNA, 42 nt, synthetic construct
  misc_feature 1..42: note = Description of Artificial Sequence: Synthetic oligonucleotide
  misc_feature 1..42: note = Category: MG29-1 sgRNA targeting HPRT
  misc_feature 1..42: note = Description: MG29-1-HPRT-sgRNA-B7
  source 1..42: mol_type = other RNA
taatttctactgttgtagatttgagactgcctttaacatctg

SEQ ID NO: 5532 - RNA, 42 nt, synthetic construct
  misc_feature 1..42: note = Description of Artificial Sequence: Synthetic oligonucleotide
  misc_feature 1..42: note = Category: MG29-1 sgRNA targeting HPRT
  misc_feature 1..42: note = Description: MG29-1-HPRT-sgRNA-C7
  source 1..42: mol_type = other RNA
taatttctactgttgtagattaacccaaatgctgcctgttga

SEQ ID NO: 5533 - RNA, 42 nt, synthetic construct
  misc_feature 1..42: note = Description of Artificial Sequence: Synthetic oligonucleotide
  misc_feature 1..42: note = Category: MG29-1 sgRNA targeting HPRT
  misc_feature 1..42: note = Description: MG29-1-HPRT-sgRNA-D7
  source 1..42: mol_type = other RNA
taatttctactgttgtagatataacccaaatgctgcctgttg

SEQ ID NO: 5534 - RNA, 42 nt, synthetic construct
  misc_feature 1..42: note = Description of Artificial Sequence: Synthetic oligonucleotide
  misc_feature 1..42: note = Category: MG29-1 sgRNA targeting HPRT
  misc_feature 1..42: note = Description: MG29-1-HPRT-sgRNA-E7
  source 1..42: mol_type = other RNA
taatttctactgttgtagattcaacaggcagcatttgggtta

SEQ ID NO: 5535 - RNA, 42 nt, synthetic construct
  misc_feature 1..42: note = Description of Artificial Sequence: Synthetic oligonucleotide
  misc_feature 1..42: note = Category: MG29-1 sgRNA targeting HPRT
  misc_feature 1..42: note = Description: MG29-1-HPRT-sgRNA-F7
  source 1..42: mol_type = other RNA
taatttctactgttgtagatcaacaggcagcatttgggttat

SEQ ID NO: 5536 - RNA, 42 nt, synthetic construct
  misc_feature 1..42: note = Description of Artificial Sequence: Synthetic oligonucleotide
  misc_feature 1..42: note = Category: MG29-1 sgRNA targeting HPRT
  misc_feature 1..42: note = Description: MG29-1-HPRT-sgRNA-G7
  source 1..42: mol_type = other RNA
taatttctactgttgtagataacaggcagcatttgggttata

SEQ ID NO: 5537 - RNA, 42 nt, synthetic construct
  misc_feature 1..42: note = Description of Artificial Sequence: Synthetic oligonucleotide
  misc_feature 1..42: note = Category: MG29-1 sgRNA targeting HPRT
  misc_feature 1..42: note = Description: MG29-1-HPRT-sgRNA-H7
  source 1..42: mol_type = other RNA
taatttctactgttgtagatgaacaaaagctggaggtggtat

SEQ ID NO: 5538 - RNA, 42 nt, synthetic construct
  misc_feature 1..42: note = Description of Artificial Sequence: Synthetic oligonucleotide
  misc_feature 1..42: note = Category: MG29-1 sgRNA targeting HPRT
  misc_feature 1..42: note = Description: MG29-1-HPRT-sgRNA-A8
  source 1..42: mol_type = other RNA
taatttctactgttgtagatggtagagttgacttataccacc

SEQ ID NO: 5539 - RNA, 42 nt, synthetic construct
  misc_feature 1..42: note = Description of Artificial Sequence: Synthetic oligonucleotide
  misc_feature 1..42: note = Category: MG29-1 sgRNA targeting HPRT
  misc_feature 1..42: note = Description: MG29-1-HPRT-sgRNA-B8
  source 1..42: mol_type = other RNA
taatttctactgttgtagatgtagagttgacttataccacct

SEQ ID NO: 5540 - RNA, 42 nt, synthetic construct
  misc_feature 1..42: note = Description of Artificial Sequence: Synthetic oligonucleotide
  misc_feature 1..42: note = Category: MG29-1 sgRNA targeting HPRT
  misc_feature 1..42: note = Description: MG29-1-HPRT-sgRNA-C8
  source 1..42: mol_type = other RNA
taatttctactgttgtagatggaacaaaagctggaggtggta

SEQ ID NO: 5541 - RNA, 42 nt, synthetic construct
  misc_feature 1..42: note = Description of Artificial Sequence: Synthetic oligonucleotide
  misc_feature 1..42: note = Category: MG29-1 sgRNA targeting HPRT
  misc_feature 1..42: note = Description: MG29-1-HPRT-sgRNA-D8
  source 1..42: mol_type = other RNA
taatttctactgttgtagattggaacaaaagctggaggtggt

SEQ ID NO: 5542 - RNA, 42 nt, synthetic construct
  misc_feature 1..42: note = Description of Artificial Sequence: Synthetic oligonucleotide
  misc_feature 1..42: note = Category: MG29-1 sgRNA targeting HPRT
  misc_feature 1..42: note = Description: MG29-1-HPRT-sgRNA-E8
  source 1..42: mol_type = other RNA
taatttctactgttgtagattttttggaacaaaagctggagg

SEQ ID NO: 5543 - RNA, 42 nt, synthetic construct
  misc_feature 1..42: note = Description of Artificial Sequence: Synthetic oligonucleotide
  misc_feature 1..42: note = Category: MG29-1 sgRNA targeting HPRT
  misc_feature 1..42: note = Description: MG29-1-HPRT-sgRNA-F8
  source 1..42: mol_type = other RNA
taatttctactgttgtagatgggtaaaacaactagtgtgcca

SEQ ID NO: 5544 - RNA, 42 nt, synthetic construct
  misc_feature 1..42: note = Description of Artificial Sequence: Synthetic oligonucleotide
  misc_feature 1..42: note = Category: MG29-1 sgRNA targeting HPRT
  misc_feature 1..42: note = Description: MG29-1-HPRT-sgRNA-G8
  source 1..42: mol_type = other RNA
taatttctactgttgtagatggcacactagttgttttaccct

SEQ ID NO: 5545 - RNA, 42 nt, synthetic construct
  misc_feature 1..42: note = Description of Artificial Sequence: Synthetic oligonucleotide
  misc_feature 1..42: note = Category: MG29-1 sgRNA targeting HPRT
  misc_feature 1..42: note = Description: MG29-1-HPRT-sgRNA-H8
  source 1..42: mol_type = other RNA
taatttctactgttgtagatgcacactagttgttttacccta

SEQ ID NO: 5546 - RNA, 42 nt, synthetic construct
  misc_feature 1..42: note = Description of Artificial Sequence: Synthetic oligonucleotide
  misc_feature 1..42: note = Category: MG29-1 sgRNA targeting HPRT
  misc_feature 1..42: note = Description: MG29-1-HPRT-sgRNA-A9
  source 1..42: mol_type = other RNA
taatttctactgttgtagatccctaaagttcctctttgtaag

SEQ ID NO: 5547 - RNA, 42 nt, synthetic construct
  misc_feature 1..42: note = Description of Artificial Sequence: Synthetic oligonucleotide
  misc_feature 1..42: note = Category: MG29-1 sgRNA targeting HPRT
  misc_feature 1..42: note = Description: MG29-1-HPRT-sgRNA-B9
  source 1..42: mol_type = other RNA
taatttctactgttgtagatgggattgtatttccaaggtttc

SEQ ID NO: 5548 - RNA, 42 nt, synthetic construct
  misc_feature 1..42: note = Description of Artificial Sequence: Synthetic oligonucleotide
  misc_feature 1..42: note = Category: MG29-1 sgRNA targeting HPRT
  misc_feature 1..42: note = Description: MG29-1-HPRT-sgRNA-C9
  source 1..42: mol_type = other RNA
taatttctactgttgtagatcaaggtttctagactgagagcc

SEQ ID NO: 5549 - RNA, 42 nt, synthetic construct
  misc_feature 1..42: note = Description of Artificial Sequence: Synthetic oligonucleotide
  misc_feature 1..42: note = Category: MG29-1 sgRNA targeting HPRT
  misc_feature 1..42: note = Description: MG29-1-HPRT-sgRNA-D9
  source 1..42: mol_type = other RNA
taatttctactgttgtagattagactgagagcccttttcatc

SEQ ID NO: 5550 - RNA, 42 nt, synthetic construct
  misc_feature 1..42: note = Description of Artificial Sequence: Synthetic oligonucleotide
  misc_feature 1..42: note = Category: MG29-1 sgRNA targeting HPRT
  misc_feature 1..42: note = Description: MG29-1-HPRT-sgRNA-E9
  source 1..42: mol_type = other RNA
taatttctactgttgtagatcatctttgctcattgacactct

SEQ ID NO: 5551 - RNA, 42 nt, synthetic construct
  misc_feature 1..42: note = Description of Artificial Sequence: Synthetic oligonucleotide
  misc_feature 1..42: note = Category: MG29-1 sgRNA targeting HPRT
  misc_feature 1..42: note = Description: MG29-1-HPRT-sgRNA-F9
  source 1..42: mol_type = other RNA
taatttctactgttgtagatatctttgctcattgacactctg

SEQ ID NO: 5552 - RNA, 42 nt, synthetic construct
  misc_feature 1..42: note = Description of Artificial Sequence: Synthetic oligonucleotide
  misc_feature 1..42: note = Category: MG29-1 sgRNA targeting HPRT
  misc_feature 1..42: note = Description: MG29-1-HPRT-sgRNA-G9
  source 1..42: mol_type = other RNA
taatttctactgttgtagatctcattgacactctgtacccat

SEQ ID NO: 5553 - RNA, 42 nt, synthetic construct
  misc_feature 1..42: note = Description of Artificial Sequence: Synthetic oligonucleotide
  misc_feature 1..42: note = Category: MG29-1 sgRNA targeting HPRT
  misc_feature 1..42: note = Description: MG29-1-HPRT-sgRNA-H9
  source 1..42: mol_type = other RNA
taatttctactgttgtagatacacacccaaggaaagactatg

SEQ ID NO: 5554 - RNA, 42 nt, synthetic construct
  misc_feature 1..42: note = Description of Artificial Sequence: Synthetic oligonucleotide
  misc_feature 1..42: note = Category: MG29-1 sgRNA targeting HPRT
  misc_feature 1..42: note = Description: MG29-1-HPRT-sgRNA-A10
  source 1..42: mol_type = other RNA
taatttctactgttgtagataacacacccaaggaaagactat

SEQ ID NO: 5555 - RNA, 42 nt, synthetic construct
  misc_feature 1..42: note = Description of Artificial Sequence: Synthetic oligonucleotide
  misc_feature 1..42: note = Category: MG29-1 sgRNA targeting HPRT
  misc_feature 1..42: note = Description: MG29-1-HPRT-sgRNA-B10
  source 1..42: mol_type = other RNA
taatttctactgttgtagatgctctccatttcatagtctttc

SEQ ID NO: 5556 - RNA, 42 nt, synthetic construct
  misc_feature 1..42: note = Description of Artificial Sequence: Synthetic oligonucleotide
  misc_feature 1..42: note = Category: MG29-1 sgRNA targeting HPRT
  misc_feature 1..42: note = Description: MG29-1-HPRT-sgRNA-C10
  source 1..42: mol_type = other RNA
taatttctactgttgtagatatagtctttccttgggtgtgtt

SEQ ID NO: 5557 - RNA, 42 nt, synthetic construct
  misc_feature 1..42: note = Description of Artificial Sequence: Synthetic oligonucleotide
  misc_feature 1..42: note = Category: MG29-1 sgRNA targeting HPRT
  misc_feature 1..42: note = Description: MG29-1-HPRT-sgRNA-D10
  source 1..42: mol_type = other RNA
taatttctactgttgtagatcttgggtgtgttaaaagtgacc

SEQ ID NO: 5558 - RNA, 42 nt, synthetic construct
  misc_feature 1..42: note = Description of Artificial Sequence: Synthetic oligonucleotide
  misc_feature 1..42: note = Category: MG29-1 sgRNA targeting HPRT
  misc_feature 1..42: note = Description: MG29-1-HPRT-sgRNA-E10
  source 1..42: mol_type = other RNA
taatttctactgttgtagatatccgtgctgagtgtaccatgg

SEQ ID NO: 5559 - RNA, 42 nt, synthetic construct
  misc_feature 1..42: note = Description of Artificial Sequence: Synthetic oligonucleotide
  misc_feature 1..42: note = Category: MG29-1 sgRNA targeting HPRT
  misc_feature 1..42: note = Description: MG29-1-HPRT-sgRNA-F10
  source 1..42: mol_type = other RNA
taatttctactgttgtagatatttcatccgtgctgagtgtac

SEQ ID NO: 5560 - RNA, 42 nt, synthetic construct
  misc_feature 1..42: note = Description of Artificial Sequence: Synthetic oligonucleotide
  misc_feature 1..42: note = Category: MG29-1 sgRNA targeting HPRT
  misc_feature 1..42: note = Description: MG29-1-HPRT-sgRNA-G10
  source 1..42: mol_type = other RNA
taatttctactgttgtagatgaaacgtcagtcttctcttttg

SEQ ID NO: 5561 - RNA, 42 nt, synthetic construct
  misc_feature 1..42: note = Description of Artificial Sequence: Synthetic oligonucleotide
  misc_feature 1..42: note = Category: MG29-1 sgRNA targeting HPRT
  misc_feature 1..42: note = Description: MG29-1-HPRT-sgRNA-H10
  source 1..42: mol_type = other RNA
taatttctactgttgtagattagagaggcacatttgccagta

SEQ ID NO: 5562 - DNA, 22 bp, unidentified
  misc_feature 1..22: note = Description of Unknown: MG29-1-HPRT-target site-A1 sequence
  misc_feature 1..22: note = Category: DNA sequence of HPRT target site
  source 1..22: mol_type = unassigned DNA
tctccctggcttacctttagga

SEQ ID NO: 5563 - DNA, 22 bp, unidentified
  misc_feature 1..22: note = Description of Unknown: MG29-1-HPRT-target site-B1 sequence
  misc_feature 1..22: note = Category: DNA sequence of HPRT target site
  source 1..22: mol_type = unassigned DNA
gaacacaagcccaccattaaaa

SEQ ID NO: 5564 - DNA, 22 bp, unidentified
  misc_feature 1..22: note = Description of Unknown: MG29-1-HPRT-target site-C1 sequence
  misc_feature 1..22: note = Category: DNA sequence of HPRT target site
  source 1..22: mol_type = unassigned DNA
aatggtgggcttgtgttctaaa

SEQ ID NO: 5565 - DNA, 22 bp, unidentified
  misc_feature 1..22: note = Description of Unknown: MG29-1-HPRT-target site-D1 sequence
  misc_feature 1..22: note = Category: DNA sequence of HPRT target site
  source 1..22: mol_type = unassigned DNA
atggtgggcttgtgttctaaag

SEQ ID NO: 5566 - DNA, 22 bp, unidentified
  misc_feature 1..22: note = Description of Unknown: MG29-1-HPRT-target site-E1 sequence
  misc_feature 1..22: note = Category: DNA sequence of HPRT target site
  source 1..22: mol_type = unassigned DNA
ccctaacaaagatgggtttgtt

SEQ ID NO: 5567 - DNA, 22 bp, unidentified
  misc_feature 1..22: note = Description of Unknown: MG29-1-HPRT-target site-F1 sequence
  misc_feature 1..22: note = Category: DNA sequence of HPRT target site
  source 1..22: mol_type = unassigned DNA
aaggcacccaaattaataacgc

SEQ ID NO: 5568 - DNA, 22 bp, unidentified
  misc_feature 1..22: note = Description of Unknown: MG29-1-HPRT-target site-G1 sequence
  misc_feature 1..22: note = Category: DNA sequence of HPRT target site
  source 1..22: mol_type = unassigned DNA
tagcgttattaatttgggtgcc

SEQ ID NO: 5569 - DNA, 22 bp, unidentified
  misc_feature 1..22: note = Description of Unknown: MG29-1-HPRT-target site-H1 sequence
  misc_feature 1..22: note = Category: DNA sequence of HPRT target site
  source 1..22: mol_type = unassigned DNA
tcgagtgtagtctgttagccac

SEQ ID NO: 5570 - DNA, 22 bp, unidentified
  misc_feature 1..22: note = Description of Unknown: MG29-1-HPRT-target site-A2 sequence
  misc_feature 1..22: note = Category: DNA sequence of HPRT target site
  source 1..22: mol_type = unassigned DNA
ttagggagttatgatgttgtcc

SEQ ID NO: 5571 - DNA, 22 bp, unidentified
  misc_feature 1..22: note = Description of Unknown: MG29-1-HPRT-target site-B2 sequence
  misc_feature 1..22: note = Category: DNA sequence of HPRT target site
  source 1..22: mol_type = unassigned DNA
taggtgcaggatcaatgacagc

SEQ ID NO: 5572 - DNA, 22 bp, unidentified
  misc_feature 1..22: note = Description of Unknown: MG29-1-HPRT-target site-C2 sequence
  misc_feature 1..22: note = Category: DNA sequence of HPRT target site
  source 1..22: mol_type = unassigned DNA
gtaggtgcaggatcaatgacag

SEQ ID NO: 5573 - DNA, 22 bp, unidentified
  misc_feature 1..22: note = Description of Unknown: MG29-1-HPRT-target site-D2 sequence
  misc_feature 1..22: note = Category: DNA sequence of HPRT target site
  source 1..22: mol_type = unassigned DNA
ctgtcattgatcctgcacctac

SEQ ID NO: 5574 - DNA, 22 bp, unidentified
  misc_feature 1..22: note = Description of Unknown: MG29-1-HPRT-target site-E2 sequence
  misc_feature 1..22: note = Category: DNA sequence of HPRT target site
  source 1..22: mol_type = unassigned DNA
cagcacagtaattctcaccaaa

SEQ ID NO: 5575 - DNA, 22 bp, unidentified
  misc_feature 1..22: note = Description of Unknown: MG29-1-HPRT-target site-F2 sequence
  misc_feature 1..22: note = Category: DNA sequence of HPRT target site
  source 1..22: mol_type = unassigned DNA
ggtgagaattactgtgctgaaa

SEQ ID NO: 5576 - DNA, 22 bp, unidentified
  misc_feature 1..22: note = Description of Unknown: MG29-1-HPRT-target site-G2 sequence
  misc_feature 1..22: note = Category: DNA sequence of HPRT target site
  source 1..22: mol_type = unassigned DNA
tcctgaatagcatggcagagga

SEQ ID NO: 5577 - DNA, 22 bp, unidentified
  misc_feature 1..22: note = Description of Unknown: MG29-1-HPRT-target site-H2 sequence
  misc_feature 1..22: note = Category: DNA sequence of HPRT target site
  source 1..22: mol_type = unassigned DNA
caagggggcccaaaatcctctg

SEQ ID NO: 5578 - DNA, 22 bp, unidentified
  misc_feature 1..22: note = Description of Unknown: MG29-1-HPRT-target site-A3 sequence
  misc_feature 1..22: note = Category: DNA sequence of HPRT target site
  source 1..22: mol_type = unassigned DNA
gcaagggggcccaaaatcctct

SEQ ID NO: 5579 - DNA, 22 bp, unidentified
  misc_feature 1..22: note = Description of Unknown: MG29-1-HPRT-target site-B3 sequence
  misc_feature 1..22: note = Category: DNA sequence of HPRT target site
  source 1..22: mol_type = unassigned DNA
gggcccccttgcaaaattaaga

SEQ ID NO: 5580 - DNA, 22 bp, unidentified
  misc_feature 1..22: note = Description of Unknown: MG29-1-HPRT-target site-C3 sequence
  misc_feature 1..22: note = Category: DNA sequence of HPRT target site
  source 1..22: mol_type = unassigned DNA
ggcccccttgcaaaattaagaa

SEQ ID NO: 5581 - DNA, 22 bp, unidentified
  misc_feature 1..22: note = Description of Unknown: MG29-1-HPRT-target site-D3 sequence
  misc_feature 1..22: note = Category: DNA sequence of HPRT target site
  source 1..22: mol_type = unassigned DNA
actacagacacaaagaagatgc

SEQ ID NO: 5582 - DNA, 22 bp, unidentified
  misc_feature 1..22: note = Description of Unknown: MG29-1-HPRT-target site-E3 sequence
  misc_feature 1..22: note = Category: DNA sequence of HPRT target site
  source 1..22: mol_type = unassigned DNA
ttattaagtcggcctcacctcc

SEQ ID NO: 5583 - DNA, 22 bp, unidentified
  misc_feature 1..22: note = Description of Unknown: MG29-1-HPRT-target site-F3 sequence
  misc_feature 1..22: note = Category: DNA sequence of HPRT target site
  source 1..22: mol_type = unassigned DNA
tattaagtcggcctcacctcct

SEQ ID NO: 5584 - DNA, 22 bp, unidentified
  misc_feature 1..22: note = Description of Unknown: MG29-1-HPRT-target site-G3 sequence
  misc_feature 1..22: note = Category: DNA sequence of HPRT target site
  source 1..22: mol_type = unassigned DNA
attaagtcggcctcacctcctc

SEQ ID NO: 5585 - DNA, 22 bp, unidentified
  misc_feature 1..22: note = Description of Unknown: MG29-1-HPRT-target site-H3 sequence
  misc_feature 1..22: note = Category: DNA sequence of HPRT target site
  source 1..22: mol_type = unassigned DNA
ttaagtcggcctcacctcctca

SEQ ID NO: 5586 - DNA, 22 bp, unidentified
  misc_feature 1..22: note = Description of Unknown: MG29-1-HPRT-target site-A4 sequence
  misc_feature 1..22: note = Category: DNA sequence of HPRT target site
  source 1..22: mol_type = unassigned DNA
tatgtaggggtcaggtaatgtt

SEQ ID NO: 5587 - DNA, 22 bp, unidentified
  misc_feature 1..22: note = Description of Unknown: MG29-1-HPRT-target site-B4 sequence
  misc_feature 1..22: note = Category: DNA sequence of HPRT target site
  source 1..22: mol_type = unassigned DNA
atgtaggggtcaggtaatgttc

SEQ ID NO: 5588 - DNA, 22 bp, unidentified
  misc_feature 1..22: note = Description of Unknown: MG29-1-HPRT-target site-C4 sequence
  misc_feature 1..22: note = Category: DNA sequence of HPRT target site
  source 1..22: mol_type = unassigned DNA
tgtaggggtcaggtaatgttct

SEQ ID NO: 5589 - DNA, 22 bp, unidentified
  misc_feature 1..22: note = Description of Unknown: MG29-1-HPRT-target site-D4 sequence
  misc_feature 1..22: note = Category: DNA sequence of HPRT target site
  source 1..22: mol_type = unassigned DNA
gaaaaaatcacggtatctgtcg

SEQ ID NO: 5590 - DNA, 22 bp, unidentified
  misc_feature 1..22: note = Description of Unknown: MG29-1-HPRT-target site-E4 sequence
  misc_feature 1..22: note = Category: DNA sequence of HPRT target site
  source 1..22: mol_type = unassigned DNA
aatcagagtaagccttctagtg

SEQ ID NO: 5591 - DNA, 22 bp, unidentified
  misc_feature 1..22: note = Description of Unknown: MG29-1-HPRT-target site-F4 sequence
  misc_feature 1..22: note = Category: DNA sequence of HPRT target site
  source 1..22: mol_type = unassigned DNA
ggacaggtactatgagagtata

SEQ ID NO: 5592 - DNA, 22 bp, unidentified
  misc_feature 1..22: note = Description of Unknown: MG29-1-HPRT-target site-G4 sequence
  misc_feature 1..22: note = Category: DNA sequence of HPRT target site
  source 1..22: mol_type = unassigned DNA
aaatgtcaacctactgtggcat

SEQ ID NO: 5593 - DNA, 22 bp, unidentified
  misc_feature 1..22: note = Description of Unknown: MG29-1-HPRT-target site-H4 sequence
  misc_feature 1..22: note = Category: DNA sequence of HPRT target site
  source 1..22: mol_type = unassigned DNA
aatgtcaacctactgtggcata

SEQ ID NO: 5594 - DNA, 22 bp, unidentified
  misc_feature 1..22: note = Description of Unknown: MG29-1-HPRT-target site-A5 sequence
  misc_feature 1..22: note = Category: DNA sequence of HPRT target site
  source 1..22: mol_type = unassigned DNA
gttgttctttcctggtatatgc

SEQ ID NO: 5595 - DNA, 22 bp, unidentified
  misc_feature 1..22: note = Description of Unknown: MG29-1-HPRT-target site-B5 sequence
  misc_feature 1..22: note = Category: DNA sequence of HPRT target site
  source 1..22: mol_type = unassigned DNA
ctggtatatgctgtggaattga

SEQ ID NO: 5596 - DNA, 22 bp, unidentified
  misc_feature 1..22: note = Description of Unknown: MG29-1-HPRT-target site-C5 sequence
  misc_feature 1..22: note = Category: DNA sequence of HPRT target site
  source 1..22: mol_type = unassigned DNA
agcatgtcctacctgtggcaac

SEQ ID NO: 5597 - DNA, 22 bp, unidentified
  misc_feature 1..22: note = Description of Unknown: MG29-1-HPRT-target site-D5 sequence
  misc_feature 1..22: note = Category: DNA sequence of HPRT target site
  source 1..22: mol_type = unassigned DNA
gtgttgccacaggtaggacatg

SEQ ID NO: 5598 - DNA, 22 bp, unidentified
  misc_feature 1..22: note = Description of Unknown: MG29-1-HPRT-target site-E5 sequence
  misc_feature 1..22: note = Category: DNA sequence of HPRT target site
  source 1..22: mol_type = unassigned DNA
tgttgccacaggtaggacatgc

SEQ ID NO: 5599 - DNA, 22 bp, unidentified
  misc_feature 1..22: note = Description of Unknown: MG29-1-HPRT-target site-F5 sequence
  misc_feature 1..22: note = Category: DNA sequence of HPRT target site
  source 1..22: mol_type = unassigned DNA
catactgtaaatgggtaaccgt

SEQ ID NO: 5600 - DNA, 22 bp, unidentified
  misc_feature 1..22: note = Description of Unknown: MG29-1-HPRT-target site-G5 sequence
  misc_feature 1..22: note = Category: DNA sequence of HPRT target site
  source 1..22: mol_type = unassigned DNA
ccatactgtaaatgggtaaccg

SEQ ID NO: 5601 - DNA, 22 bp, unidentified
  misc_feature 1..22: note = Description of Unknown: MG29-1-HPRT-target site-H5 sequence
  misc_feature 1..22: note = Category: DNA sequence of HPRT target site
  source 1..22: mol_type = unassigned DNA
ataaagctccatctctaaggca

SEQ ID NO: 5602 - DNA, 22 bp, unidentified
  misc_feature 1..22: note = Description of Unknown: MG29-1-HPRT-target site-A6 sequence
  misc_feature 1..22: note = Category: DNA sequence of HPRT target site
  source 1..22: mol_type = unassigned DNA
gtgataccttttctggagcatt

SEQ ID NO: 5603 - DNA, 22 bp, unidentified
  misc_feature 1..22: note = Description of Unknown: MG29-1-HPRT-target site-B6 sequence
  misc_feature 1..22: note = Category: DNA sequence of HPRT target site
  source 1..22: mol_type = unassigned DNA
ctggagcattcctgagttcagg

SEQ ID NO: 5604 - DNA, 22 bp, unidentified
  misc_feature 1..22: note = Description of Unknown: MG29-1-HPRT-target site-C6 sequence
  misc_feature 1..22: note = Category: DNA sequence of HPRT target site
  source 1..22: mol_type = unassigned DNA
tggagcattcctgagttcaggt

SEQ ID NO: 5605 - DNA, 22 bp, unidentified
  misc_feature 1..22: note = Description of Unknown: MG29-1-HPRT-target site-D6 sequence
  misc_feature 1..22: note = Category: DNA sequence of HPRT target site
  source 1..22: mol_type = unassigned DNA
tgctgtgattggcttgttatgt

SEQ ID NO: 5606 - DNA, 22 bp, unidentified
  misc_feature 1..22: note = Description of Unknown: MG29-1-HPRT-target site-E6 sequence
  misc_feature 1..22: note = Category: DNA sequence of HPRT target site
  source 1..22: mol_type = unassigned DNA
gctgtgattggcttgttatgtt

SEQ ID NO: 5607 - DNA, 22 bp, unidentified
  misc_feature 1..22: note = Description of Unknown: MG29-1-HPRT-target site-F6 sequence
  misc_feature 1..22: note = Category: DNA sequence of HPRT target site
  source 1..22: mol_type = unassigned DNA
ctgtgattggcttgttatgttc

SEQ ID NO: 5608 - DNA, 22 bp, unidentified
  misc_feature 1..22: note = Description of Unknown: MG29-1-HPRT-target site-G6 sequence
  misc_feature 1..22: note = Category: DNA sequence of HPRT target site
  source 1..22: mol_type = unassigned DNA
ttggaagagtcatgagggacat

SEQ ID NO: 5609 - DNA, 22 bp, unidentified
  misc_feature 1..22: note = Description of Unknown: MG29-1-HPRT-target site-H6 sequence
  misc_feature 1..22: note = Category: DNA sequence of HPRT target site
  source 1..22: mol_type = unassigned DNA
cagatgttaaaggcagtctcaa

SEQ ID NO: 5610 - DNA, 22 bp, unidentified
  misc_feature 1..22: note = Description of Unknown: MG29-1-HPRT-target site-A7 sequence
  misc_feature 1..22: note = Category: DNA sequence of HPRT target site
  source 1..22: mol_type = unassigned DNA
cttgagactgcctttaacatct

SEQ ID NO: 5611 - DNA, 22 bp, unidentified
  misc_feature 1..22: note = Description of Unknown: MG29-1-HPRT-target site-B7 sequence
  misc_feature 1..22: note = Category: DNA sequence of HPRT target site
  source 1..22: mol_type = unassigned DNA
ttgagactgcctttaacatctg

SEQ ID NO: 5612 - DNA, 22 bp, unidentified
  misc_feature 1..22: note = Description of Unknown: MG29-1-HPRT-target site-C7 sequence
  misc_feature 1..22: note = Category: DNA sequence of HPRT target site
  source 1..22: mol_type = unassigned DNA
taacccaaatgctgcctgttga

SEQ ID NO: 5613 - DNA, 22 bp, unidentified
  misc_feature 1..22: note = Description of Unknown: MG29-1-HPRT-target site-D7 sequence
  misc_feature 1..22: note = Category: DNA sequence of HPRT target site
  source 1..22: mol_type = unassigned DNA
ataacccaaatgctgcctgttg

SEQ ID NO: 5614 - DNA, 22 bp, unidentified
  misc_feature 1..22: note = Description of Unknown: MG29-1-HPRT-target site-E7 sequence
  misc_feature 1..22: note = Category: DNA sequence of HPRT target site
  source 1..22: mol_type = unassigned DNA
tcaacaggcagcatttgggtta

SEQ ID NO: 5615 - DNA, 22 bp, unidentified
  misc_feature 1..22: note = Description of Unknown: MG29-1-HPRT-target site-F7 sequence
  misc_feature 1..22: note = Category: DNA sequence of HPRT target site
  source 1..22: mol_type = unassigned DNA
caacaggcagcatttgggttat

SEQ ID NO: 5616 - DNA, 22 bp, unidentified
  misc_feature 1..22: note = Description of Unknown: MG29-1-HPRT-target site-G7 sequence
  misc_feature 1..22: note = Category: DNA sequence of HPRT target site
  source 1..22: mol_type = unassigned DNA
aacaggcagcatttgggttata

SEQ ID NO: 5617 - DNA, 22 bp, unidentified
  misc_feature 1..22: note = Description of Unknown: MG29-1-HPRT-target site-H7 sequence
  misc_feature 1..22: note = Category: DNA sequence of HPRT target site
  source 1..22: mol_type = unassigned DNA
gaacaaaagctggaggtggtat

SEQ ID NO: 5618 - DNA, 22 bp, unidentified
  misc_feature 1..22: note = Description of Unknown: MG29-1-HPRT-target site-A8 sequence
  misc_feature 1..22: note = Category: DNA sequence of HPRT target site
  source 1..22: mol_type = unassigned DNA
ggtagagttgacttataccacc

SEQ ID NO: 5619 - DNA, 22 bp, unidentified
  misc_feature 1..22: note = Description of Unknown: MG29-1-HPRT-target site-B8 sequence
  misc_feature 1..22: note = Category: DNA sequence of HPRT target site
  source 1..22: mol_type = unassigned DNA
gtagagttgacttataccacct

SEQ ID NO: 5620 - DNA, 22 bp, unidentified
  misc_feature 1..22: note = Description of Unknown: MG29-1-HPRT-target site-C8 sequence
  misc_feature 1..22: note = Category: DNA sequence of HPRT target site
  source 1..22: mol_type = unassigned DNA
ggaacaaaagctggaggtggta

SEQ ID NO: 5621 - DNA, 22 bp, unidentified
  misc_feature 1..22: note = Description of Unknown: MG29-1-HPRT-target site-D8 sequence
  misc_feature 1..22: note = Category: DNA sequence of HPRT target site
  source 1..22: mol_type = unassigned DNA
tggaacaaaagctggaggtggt

SEQ ID NO: 5622 - DNA, 22 bp, unidentified
  misc_feature 1..22: note = Description of Unknown: MG29-1-HPRT-target site-E8 sequence
  misc_feature 1..22: note = Category: DNA sequence of HPRT target site
  source 1..22: mol_type = unassigned DNA
tttttggaacaaaagctggagg

SEQ ID NO: 5623 - DNA, 22 bp, unidentified
  misc_feature 1..22: note = Description of Unknown: MG29-1-HPRT-target site-F8 sequence
  misc_feature 1..22: note = Category: DNA sequence of HPRT target site
  source 1..22: mol_type = unassigned DNA
gggtaaaacaactagtgtgcca

SEQ ID NO: 5624 - DNA, 22 bp, unidentified
  misc_feature 1..22: note = Description of Unknown: MG29-1-HPRT-target site-G8 sequence
  misc_feature 1..22: note = Category: DNA sequence of HPRT target site
  source 1..22: mol_type = unassigned DNA
ggcacactagttgttttaccct

SEQ ID NO: 5625 - DNA, 22 bp, unidentified
  misc_feature 1..22: note = Description of Unknown: MG29-1-HPRT-target site-H8 sequence
  misc_feature 1..22: note = Category: DNA sequence of HPRT target site
  source 1..22: mol_type = unassigned DNA
gcacactagttgttttacccta

SEQ ID NO: 5626 - DNA, 22 bp, unidentified
  misc_feature 1..22: note = Description of Unknown: MG29-1-HPRT-target site-A9 sequence
  misc_feature 1..22: note = Category: DNA sequence of HPRT target site
  source 1..22: mol_type = unassigned DNA
ccctaaagttcctctttgtaag

SEQ ID NO: 5627 - DNA, 22 bp, unidentified
  misc_feature 1..22: note = Description of Unknown: MG29-1-HPRT-target site-B9 sequence
  misc_feature 1..22: note = Category: DNA sequence of HPRT target site
  source 1..22: mol_type = unassigned DNA
gggattgtatttccaaggtttc

SEQ ID NO: 5628 - DNA, 22 bp, unidentified
  misc_feature 1..22: note = Description of Unknown: MG29-1-HPRT-target site-C9 sequence
  misc_feature 1..22: note = Category: DNA sequence of HPRT target site
  source 1..22: mol_type = unassigned DNA
caaggtttctagactgagagcc

SEQ ID NO: 5629 - DNA, 22 bp, unidentified
  misc_feature 1..22: note = Description of Unknown: MG29-1-HPRT-target site-D9 sequence
  misc_feature 1..22: note = Category: DNA sequence of HPRT target site
  source 1..22: mol_type = unassigned DNA
tagactgagagcccttttcatc

SEQ ID NO: 5630 - DNA, 22 bp, unidentified
  misc_feature 1..22: note = Description of Unknown: MG29-1-HPRT-target site-E9 sequence
  misc_feature 1..22: note = Category: DNA sequence of HPRT target site
  source 1..22: mol_type = unassigned DNA
catctttgctcattgacactct

SEQ ID NO: 5631 - DNA, 22 bp, unidentified
  misc_feature 1..22: note = Description of Unknown: MG29-1-HPRT-target site-F9 sequence
  misc_feature 1..22: note = Category: DNA sequence of HPRT target site
  source 1..22: mol_type = unassigned DNA
atctttgctcattgacactctg

SEQ ID NO: 5632 - DNA, 22 bp, unidentified
  misc_feature 1..22: note = Description of Unknown: MG29-1-HPRT-target site-G9 sequence
  misc_feature 1..22: note = Category: DNA sequence of HPRT target site
  source 1..22: mol_type = unassigned DNA
ctcattgacactctgtacccat

SEQ ID NO: 5633 - DNA, 22 bp, unidentified
  misc_feature 1..22: note = Description of Unknown: MG29-1-HPRT-target site-H9 sequence
  misc_feature 1..22: note = Category: DNA sequence of HPRT target site
  source 1..22: mol_type = unassigned DNA
acacacccaaggaaagactatg

SEQ ID NO: 5634 - DNA, 22 bp, unidentified
  misc_feature 1..22: note = Description of Unknown: MG29-1-HPRT-target site-A10 sequence
  misc_feature 1..22: note = Category: DNA sequence of HPRT target site
  source 1..22: mol_type = unassigned DNA
aacacacccaaggaaagactat

SEQ ID NO: 5635 - DNA, 22 bp, unidentified
  misc_feature 1..22: note = Description of Unknown: MG29-1-HPRT-target site-B10 sequence
  misc_feature 1..22: note = Category: DNA sequence of HPRT target site
  source 1..22: mol_type = unassigned DNA
gctctccatttcatagtctttc

SEQ ID NO: 5636 - DNA, 22 bp, unidentified
  misc_feature 1..22: note = Description of Unknown: MG29-1-HPRT-target site-C10 sequence
  misc_feature 1..22: note = Category: DNA sequence of HPRT target site
  source 1..22: mol_type = unassigned DNA
atagtctttccttgggtgtgtt

SEQ ID NO: 5637 - DNA, 22 bp, unidentified
  misc_feature 1..22: note = Description of Unknown: MG29-1-HPRT-target site-D10 sequence
  misc_feature 1..22: note = Category: DNA sequence of HPRT target site
  source 1..22: mol_type = unassigned DNA
cttgggtgtgttaaaagtgacc

SEQ ID NO: 5638 - DNA, 22 bp, unidentified
  misc_feature 1..22: note = Description of Unknown: MG29-1-HPRT-target site-E10 sequence
  misc_feature 1..22: note = Category: DNA sequence of HPRT target site
  source 1..22: mol_type = unassigned DNA
atccgtgctgagtgtaccatgg

SEQ ID NO: 5639 - DNA, 22 bp, unidentified
  misc_feature 1..22: note = Description of Unknown: MG29-1-HPRT-target site-F10 sequence
  misc_feature 1..22: note = Category: DNA sequence of HPRT target site
  source 1..22: mol_type = unassigned DNA
atttcatccgtgctgagtgtac

SEQ ID NO: 5640 - DNA, 22 bp, unidentified
  misc_feature 1..22: note = Description of Unknown: MG29-1-HPRT-target site-G10 sequence
  misc_feature 1..22: note = Category: DNA sequence of HPRT target site
  source 1..22: mol_type = unassigned DNA
gaaacgtcagtcttctcttttg

SEQ ID NO: 5641 - DNA, 22 bp, unidentified
  misc_feature 1..22: note = Description of Unknown: MG29-1-HPRT-target site-H10 sequence
  misc_feature 1..22: note = Category: DNA sequence of HPRT target site
  source 1..22: mol_type = unassigned DNA
tagagaggcacatttgccagta

SEQ ID NO: 5642 - RNA, 40 nt, synthetic construct
  misc_feature 1..40: note = Description of Artificial Sequence: Synthetic oligonucleotide
  misc_feature 1..40: note = Category: MG29-1 sgRNA targeting human TRBC1/2
  misc_feature 1..40: note = Description: MG29-1-TRBC1/2-sgRNA-A1
  source 1..40: mol_type = other RNA
taatttctactgttgtagatagccatcagaagcagagatc

SEQ ID NO: 5643 - RNA, 40 nt, synthetic construct
  misc_feature 1..40: note = Description of Artificial Sequence: Synthetic oligonucleotide
  misc_feature 1..40: note = Category: MG29-1 sgRNA targeting human TRBC1/2
  misc_feature 1..40: note = Description: MG29-1-TRBC1/2-sgRNA-B1
  source 1..40: mol_type = other RNA
taatttctactgttgtagatggtgtgggagatctctgctt

SEQ ID NO: 5644 - RNA, 40 nt, synthetic construct
  misc_feature 1..40: note = Description of Artificial Sequence: Synthetic oligonucleotide
  misc_feature 1..40: note = Category: MG29-1 sgRNA targeting human TRBC1/2
  misc_feature 1..40: note = Description: MG29-1-TRBC1/2-sgRNA-C1
  source 1..40: mol_type = other RNA
taatttctactgttgtagatgggtgtgggagatctctgct

SEQ ID NO: 5645 - RNA, 40 nt, synthetic construct
  misc_feature 1..40: note = Description of Artificial Sequence: Synthetic oligonucleotide
  misc_feature 1..40: note = Category: MG29-1 sgRNA targeting human TRBC1/2
  misc_feature 1..40: note = Description: MG29-1-TRBC1/2-sgRNA-D1
  source 1..40: mol_type = other RNA
taatttctactgttgtagatgccctatcctgggtccactc

SEQ ID NO: 5646 - RNA, 40 nt, synthetic construct
  misc_feature 1..40: note = Description of Artificial Sequence: Synthetic oligonucleotide
  misc_feature 1..40: note = Category: MG29-1 sgRNA targeting human TRBC1/2
  misc_feature 1..40: note = Description: MG29-1-TRBC1/2-sgRNA-E1
  source 1..40: mol_type = other RNA
taatttctactgttgtagattttcagactgtggctttacc

SEQ ID NO: 5647 - RNA, 40 nt, synthetic construct
  misc_feature 1..40: note = Description of Artificial Sequence: Synthetic oligonucleotide
  misc_feature 1..40: note = Category: MG29-1 sgRNA targeting human TRBC1/2
  misc_feature 1..40: note = Description: MG29-1-TRBC1/2-sgRNA-F1
  source 1..40: mol_type = other RNA
taatttctactgttgtagatagactgtggctttacctcgg

SEQ ID NO: 5648 - RNA, 40 nt, synthetic construct
  misc_feature 1..40: note = Description of Artificial Sequence: Synthetic oligonucleotide
  misc_feature 1..40: note = Category: MG29-1 sgRNA targeting human TRBC1/2
  misc_feature 1..40: note = Description: MG29-1-TRBC1/2-sgRNA-G1
  source 1..40: mol_type = other RNA
taatttctactgttgtagattcttctgcaggtcaagagaa

SEQ ID NO: 5649 - RNA, 40 nt, synthetic construct
  misc_feature 1..40: note = Description of Artificial Sequence: Synthetic oligonucleotide
  misc_feature 1..40: note = Category: MG29-1 sgRNA targeting human TRBC1/2
  misc_feature 1..40: note = Description: MG29-1-TRBC1/2-sgRNA-H1
  source 1..40: mol_type = other RNA
taatttctactgttgtagattcttgacctgcagaagagaa

SEQ ID NO: 5650 - RNA, 40 nt, synthetic construct
  misc_feature 1..40: note = Description of Artificial Sequence: Synthetic oligonucleotide
  misc_feature 1..40: note = Category: MG29-1 sgRNA targeting human TRBC1/2
  misc_feature 1..40: note = Description: MG29-1-TRBC1/2-sgRNA-A2
  source 1..40: mol_type = other RNA
taatttctactgttgtagataggtcctctggaaagggaag

SEQ ID NO: 5651 - RNA, 40 nt, synthetic construct
  misc_feature 1..40: note = Description of Artificial Sequence: Synthetic oligonucleotide
  misc_feature 1..40: note = Category: MG29-1 sgRNA targeting human TRBC1/2
  misc_feature 1..40: note = Description: MG29-1-TRBC1/2-sgRNA-B2
  source 1..40: mol_type = other RNA
taatttctactgttgtagatcaggtcctctggaaagggaa

SEQ ID NO: 5652 - RNA, 40 nt, synthetic construct
  misc_feature 1..40: note = Description of Artificial Sequence: Synthetic oligonucleotide
  misc_feature 1..40: note = Category: MG29-1 sgRNA targeting human TRBC1/2
  misc_feature 1..40: note = Description: MG29-1-TRBC1/2-sgRNA-C2
  source 1..40: mol_type = other RNA
taatttctactgttgtagattcaggtcctctggaaaggga

SEQ ID NO: 5653 - RNA, 40 nt, synthetic construct; identical to SEQ ID NO: 5642
  misc_feature 1..40: note = Description of Artificial Sequence: Synthetic oligonucleotide
  misc_feature 1..40: note = Category: MG29-1 sgRNA targeting human TRBC1/2
  misc_feature 1..40: note = Description: MG29-1-TRBC1/2-sgRNA-D2
  source 1..40: mol_type = other RNA

SEQ ID NO: 5654 - RNA, 40 nt, synthetic construct; identical to SEQ ID NO: 5643
  misc_feature 1..40: note = Description of Artificial Sequence: Synthetic oligonucleotide
  misc_feature 1..40: note = Category: MG29-1 sgRNA targeting human TRBC1/2
  misc_feature 1..40: note = Description: MG29-1-TRBC1/2-sgRNA-E2
  source 1..40: mol_type = other RNA

SEQ ID NO: 5655 - RNA, 40 nt, synthetic construct; identical to SEQ ID NO: 5644
  misc_feature 1..40: note = Description of Artificial Sequence: Synthetic oligonucleotide
  misc_feature 1..40: note = Category: MG29-1 sgRNA targeting human TRBC1/2
  misc_feature 1..40: note = Description: MG29-1-TRBC1/2-sgRNA-F2
  source 1..40: mol_type = other RNA

SEQ ID NO: 5656 - RNA, 40 nt, synthetic construct; identical to SEQ ID NO: 5645
  misc_feature 1..40: note = Description of Artificial Sequence: Synthetic oligonucleotide
  misc_feature 1..40: note = Category: MG29-1 sgRNA targeting human TRBC1/2
  misc_feature 1..40: note = Description: MG29-1-TRBC1/2-sgRNA-G2
  source 1..40: mol_type = other RNA

SEQ ID NO: 5657 - RNA, 40 nt, synthetic construct
  misc_feature 1..40: note = Description of Artificial Sequence: Synthetic oligonucleotide
  misc_feature 1..40: note = Category: MG29-1 sgRNA targeting human TRBC1/2
  misc_feature 1..40: note = Description: MG29-1-TRBC1/2-sgRNA-H2
  source 1..40: mol_type = other RNA
taatttctactgttgtagatctttcagactgtggcttcac

SEQ ID NO: 5658 - RNA, 40 nt, synthetic construct
  misc_feature 1..40: note = Description of Artificial Sequence: Synthetic oligonucleotide
  misc_feature 1..40: note = Category: MG29-1 sgRNA targeting human TRBC1/2
  misc_feature 1..40: note = Description: MG29-1-TRBC1/2-sgRNA-A3
  source 1..40: mol_type = other RNA
taatttctactgttgtagattttcagactgtggcttcacc

SEQ ID NO: 5659 - RNA, 40 nt, synthetic construct
  misc_feature 1..40: note = Description of Artificial Sequence: Synthetic oligonucleotide
  misc_feature 1..40: note = Category: MG29-1 sgRNA targeting human TRBC1/2
  misc_feature 1..40: note = Description: MG29-1-TRBC1/2-sgRNA-B3
  source 1..40: mol_type = other RNA
taatttctactgttgtagatagactgtggcttcacctccg

SEQ ID NO: 5660 - RNA, 40 nt, synthetic construct
  misc_feature 1..40: note = Description of Artificial Sequence: Synthetic oligonucleotide
  misc_feature 1..40: note = Category: MG29-1 sgRNA targeting human TRBC1/2
  misc_feature 1..40: note = Description: MG29-1-TRBC1/2-sgRNA-C3
  source 1..40: mol_type = other RNA
taatttctactgttgtagattcttgacctgtggaagagag

SEQ ID NO: 5661 - DNA, 20 bp, unidentified
  misc_feature 1..20: note = Description of Unknown: MG29-1-TRBC1/2-target site-A1 sequence
  misc_feature 1..20: note = Category: DNA sequence of TRBC1/2 target site
  source 1..20: mol_type = unassigned DNA
agccatcagaagcagagatc

SEQ ID NO: 5662 - DNA, 20 bp, unidentified
  misc_feature 1..20: note = Description of Unknown: MG29-1-TRBC1/2-target site-B1 sequence
  misc_feature 1..20: note = Category: DNA sequence of TRBC1/2 target site
  source 1..20: mol_type = unassigned DNA
ggtgtgggagatctctgctt

SEQ ID NO: 5663 - DNA, 20 bp, unidentified
  misc_feature 1..20: note = Description of Unknown: MG29-1-TRBC1/2-target site-C1 sequence
  misc_feature 1..20: note = Category: DNA sequence of TRBC1/2 target site
  source 1..20: mol_type = unassigned DNA
gggtgtgggagatctctgct

SEQ ID NO: 5664 - DNA, 20 bp, unidentified
  misc_feature 1..20: note = Description of Unknown: MG29-1-TRBC1/2-target site-D1 sequence
  misc_feature 1..20: note = Category: DNA sequence of TRBC1/2 target site
  source 1..20: mol_type = unassigned DNA
gccctatcctgggtccactc

SEQ ID NO: 5665 - DNA, 20 bp, unidentified
  misc_feature 1..20: note = Description of Unknown: MG29-1-TRBC1/2-target site-E1 sequence
  misc_feature 1..20: note = Category: DNA sequence of TRBC1/2 target site
  source 1..20: mol_type = unassigned DNA
tttcagactgtggctttacc

SEQ ID NO: 5666 - DNA, 20 bp, unidentified
  misc_feature 1..20: note = Description of Unknown: MG29-1-TRBC1/2-target site-F1 sequence
  misc_feature 1..20: note = Category: DNA sequence of TRBC1/2 target site
  source 1..20: mol_type = unassigned DNA
agactgtggctttacctcgg

SEQ ID NO: 5667 - DNA, 20 bp, unidentified
  misc_feature 1..20: note = Description of Unknown: MG29-1-TRBC1/2-target site-G1 sequence
  misc_feature 1..20: note = Category: DNA sequence of TRBC1/2 target site
  source 1..20: mol_type = unassigned DNA
tcttctgcaggtcaagagaa

SEQ ID NO: 5668 - DNA, 20 bp, unidentified
  misc_feature 1..20: note = Description of Unknown: MG29-1-TRBC1/2-target site-H1 sequence
  misc_feature 1..20: note = Category: DNA sequence of TRBC1/2 target site
  source 1..20: mol_type = unassigned DNA
tcttgacctgcagaagagaa

SEQ ID NO: 5669 - DNA, 20 bp, unidentified
  misc_feature 1..20: note = Description of Unknown: MG29-1-TRBC1/2-target site-A2 sequence
  misc_feature 1..20: note = Category: DNA sequence of TRBC1/2 target site
  source 1..20: mol_type = unassigned DNA
aggtcctctggaaagggaag

SEQ ID NO: 5670 - DNA, 20 bp, unidentified
  misc_feature 1..20: note = Description of Unknown: MG29-1-TRBC1/2-target site-B2 sequence
  misc_feature 1..20: note = Category: DNA sequence of TRBC1/2 target site
  source 1..20: mol_type = unassigned DNA
caggtcctctggaaagggaa

SEQ ID NO: 5671 - DNA, 20 bp, unidentified
  misc_feature 1..20: note = Description of Unknown: MG29-1-TRBC1/2-target site-C2 sequence
  misc_feature 1..20: note = Category: DNA sequence of TRBC1/2 target site
  source 1..20: mol_type = unassigned DNA
tcaggtcctctggaaaggga

SEQ ID NO: 5672 - DNA, 20 bp, unidentified
  misc_feature 1..20: note = Description of Unknown: MG29-1-TRBC1/2-target site-D2 sequence
  misc_feature 1..20: note = Category: DNA sequence of TRBC1/2 target site
  source 1..20: mol_type = unassigned DNA
agccatcagaagcagagatc

SEQ ID NO: 5673 - DNA, 20 bp, unidentified
  misc_feature 1..20: note = Description of Unknown: MG29-1-TRBC1/2-target site-E2 sequence
  misc_feature 1..20: note = Category: DNA sequence of TRBC1/2 target site
  source 1..20: mol_type = unassigned DNA
ggtgtgggagatctctgctt

SEQ ID NO: 5674 - DNA, 20 bp, unidentified
  misc_feature 1..20: note = Description of Unknown: MG29-1-TRBC1/2-target site-F2 sequence
  misc_feature 1..20: note = Category: DNA sequence of TRBC1/2 target site
  source 1..20: mol_type = unassigned DNA
gggtgtgggagatctctgct

SEQ ID NO: 5675 - DNA, 20 bp, unidentified
  misc_feature 1..20: note = Description of Unknown: MG29-1-TRBC1/2-target site-G2 sequence
  misc_feature 1..20: note = Category: DNA sequence of TRBC1/2 target site
  source 1..20: mol_type = unassigned DNA
gccctatcctgggtccactc

SEQ ID NO: 5676 - DNA, 20 bp, unidentified
  misc_feature 1..20: note = Description of Unknown: MG29-1-TRBC1/2-target site-H2 sequence
  misc_feature 1..20: note = Category: DNA sequence of TRBC1/2 target site
  source 1..20: mol_type = unassigned DNA
ctttcagactgtggcttcac

SEQ ID NO: 5677 - DNA, 20 bp, unidentified
  misc_feature 1..20: note = Description of Unknown: MG29-1-TRBC1/2-target site-A3 sequence
  misc_feature 1..20: note = Category: DNA sequence of TRBC1/2 target site
  source 1..20: mol_type = unassigned DNA
tttcagactgtggcttcacc

SEQ ID NO: 5678 - DNA, 20 bp, unidentified
  misc_feature 1..20: note = Description of Unknown: MG29-1-TRBC1/2-target site-B3 sequence
  misc_feature 1..20: note = Category: DNA sequence of TRBC1/2 target site
  source 1..20: mol_type = unassigned DNA
agactgtggcttcacctccg

SEQ ID NO: 5679 - DNA, 20 bp, unidentified
  misc_feature 1..20: note = Description of Unknown: MG29-1-TRBC1/2-target site-C3 sequence
  misc_feature 1..20: note = Category: DNA sequence of TRBC1/2 target site
  source 1..20: mol_type = unassigned DNA
tcttgacctgtggaagagag

SEQ ID NO: 5680 - DNA, 4212 bp, synthetic construct
  misc_feature 1..4212: note = Description of Artificial Sequence: Synthetic polynucleotide
  misc_feature 1..4212: note = Category: MG29-1 containing 5'UTR, NLS, CDS, NLS, 3'UTR, polyA tail
  misc_feature 1..4212: note = Description: MG29-1 mRNA
  source 1..4212: mol_type = other DNA
gaaaagccagctccagcaggcgctgctcactcctccccatcctctccctctgtccctctgtccctctgaccctgcactgtcccagcaccatggcccctaagaagaagagaaaagtcggcggaggcggcagcttcaacaacttcatcaagaagtacagcctgcagaaaaccctgcgcttcgagctgaagcctgtgggcgagacagccgactacatcgaggacttcaagagcgagtacctgaaggacaccgtgctgaaggacgagcagagagccaaggactaccaagagatcaagaccctgatcgacgattaccaccgcgagtacatcgaagagtgcctgagagaacccgtggacaagaaaaccggcgagatcctggacttcacccaggacctggaagatgccttcagctactaccagaagctgaaagagaaccccaccgagaacagagtcggctgggagaaagagcaagagagcctgaggaagaagctggtcacctccttcgtgggcaacgacggcctgttcaagaaagagttcatcaccagggacctgcctgagtggctgcagaagaaaggactctggggcgagtacaaggacacagtggaaaacttcaagaagttcaccacctacttcagcggcttccacgagaaccggaagaacatgtacaccgccgaggctcagagcaccgctatcgccaacagactgatgaacgacaacctgcctaagttctttaacaactacctggcctaccagaccatcaaagagaagcaccccgacctggtgttcagactggatgatgctctgctgcaggccgctggcgtggaacatctggatgaggctttccagcctagatacttcagcagactgttcgcccagagcggcatcaccgctttcaacgagctgatcggcggcagaaccacagagaacggcgagaagatccagggcctgaacgagcagatcaacctgtacagacagcagaaccccgagaaggccaagggcttccccagattcatgcctctgttcaagcagatcctgagcgacagagagacacacagctttctgcccgacgccttcgagaacgacaaagagctgctccaggctctgagagactacgtggacgccgccacatctgaggaaggcatgatcagccagctgaacaaggccatgaaccagttcgtgaccgccgacctgaagagagtgtacatcaagagcgccgctctgaccagcctgagccaagagctgttccacttcttcggcgtgatcagcgacgctatcgcttggtacgccgagaagagactgagccccaagaaggcccaagagtctttcctgaagcaagaggtgtacgccatcgaggaactgaaccaggctgtcgtgggctacatcgaccagctggaagatcagagcgagctgcagcaactgctggtggacctgccagatcctcagaaacccgtgtccagcttcatcctgacacactggcagaagtctcaagagcccctgcaggcagtgatcgccaaggtggaacctctgttcgaactggaagaactgagcaagaacaagagggccccaaagcacgacaaggaccaaggcggcgagggatttcagcaggtcgacgccatcaagaacatgctggacgccttcatggaagtgtcccacgctatcaagcccctgtacctggtcaagggaagaaaggccatcgacatgcccgacgtggacaccggcttctacgctgatttcgccgaggcctacagcgcctacgagcaagtgacagtgtccctgtacaacaagaccagaaaccacctgtccaagaagcccttcagcaaggacaagatcaagatcaacttcgacgcccctacactgctgaacggctgggacctgaacaaagagagcgacaacaagtccatcatcctgcggaaggacggcaacttctacctggcaatcatgcaccccaagcacaccaaggtgttcgactgctactctgcctctgaggctgccggcaagtgctacgagaagatgaactacaagctgctgagcggcgccaacaagatgctgcctaaggtgttctttagcaagaagggcatcgagacattcagccctccacaagaaatcctggacctgtacaagaacaacgagcataagaagggcgccaccttcaagctggaatcctgccacaagctgatcgatttcttcaagcggaacatccccaagtacaaggtgcaccctaccgacaactttggctgggacgtgttcggctttcacttcagccctaccagcagctacggcgacctgtctggcttctacagagaggtggaagcccagggatacaagctgtggttcagcgacgtgtccgaggcttacatcaacaaatgcgtggaagagggcaagctgttcctgttccaaatctacaacaaggacttctcccctaactccaccggcaagcccaacctgcacaccctgtattggaagggcctgttcgagcccgagaacctgaaagacgtggtgctgaagctgaatggcgaggccgagatcttctaccggaagcacagcatcaagcacgaggacaagaccatccacagagctaaggaccctatcgctaacaagaacgctgacaaccccaagaaacagagcgtgttcgattacgacatcatcaaggataagcggtatacccaggacaagttcttcttccacgtgccaatcagcctgaacttcaaaagccagggcgtcgtgcggttcaacgataagatcaacggcctgctggccgctcaggacgatgtgcatgtgatcggcatcgacagaggcgagagacatctgctgtactacaccgtggtcaacggcaagggcgaagtggtggaacagggcagcctgaatcaggtggccacagatcagggctacgtggtggattaccagcagaagctgcacgccaaagagaaagaacgcgaccaggccagaaagaactggtccaccatcgagaacatcaaagaactgaaggccggctacctgagccaggtggtgcataagctggctcagctgatcgtgaagcacaacgccatcgtgtgcctcgaggacctgaatttcggcttcaagaggggcagattcaaggtcgagaaacaggtgtaccagaagttcgagaaggctctgatcgacaagctgaactacctcgtgttcaaagagagaggcgccacacaggctggcggatacctgaatgcttaccagctggccgcacctttcgagagctttgagaagctgggcaagcagaccggcatcctgtactacgtgcggagcgactacaccagcaagatcgaccctgctaccggcttcgtggactttctgaagcctaagtacgagagcatggccaagagcaaagtgttcttcgagtccttcgagcgcatccagtggaaccaggccaaaggctacttcgagttcgagtttgactacaagaagatgtgccccagcagaaagttcggcgactacagaaccagatgggtcgtgtgcaccttcggcgacacccgctaccagaacagaagaaacaagagcagcggccagtgggagacagagacaatcgatgtgacagcccagctgaaagccctgttcgccgcttacggcatcacatacaatcaagaggataacatcaaggacgccattgccgccgtgaagtacaccaagttctacaagcagctgtactggctgctgagactgaccctgagcctgagacacagcgtgacaggcaccgacgaggatttcatcctgtctccagtggccgacgagaatggcgtgttctttgactctaggaaggccaccgacaagcagcctaaggacgctgatgctaacggcgcctaccatatcgccctgaaaggcctgtggaatctccagcagatcagacagcacgactggaacgtggaaaagcccaaaaagctgaacctcgccatgaagaacgaagagtggttcggcttcgctcagaagaagaagtttagagccagcggcggcaagaggcctgccgctacaaaaaaagccggccaggccaagaaaaagaagtgaccacacccccattcccccactccagatagaacttcagttatatctcacgtgtctggagttggatcccttgaagactaaaaaaaaaaaaaaaaaaaaaaaaaaaaaaaaaaaaaaaaaaaaaaaaaaaaaaaaaaaaaaaaaaaaaaaaaaaaaaaaaaaaaaaaaaaaaaaaaaaaaaaaaaaa

SEQ ID NO: 5681 - RNA, 42 nt, synthetic construct; identical to SEQ ID NO: 4404
  misc_feature 1..42: note = Description of Artificial Sequence: Synthetic oligonucleotide
  misc_feature 1..42: note = Category: MG29-1 sgRNA targeting TRAC
  misc_feature 1..42: note = Description: MG29-1-TRAC-sgRNA-35
  source 1..42: mol_type = other RNA

SEQ ID NO: 5682 - DNA, 22 bp, unidentified
  misc_feature 1..22: note = Description of Unknown: MG29-1-TRAC-target site-35 sequence
  misc_feature 1..22: note = Category: DNA sequence of TRAC target site
  source 1..22: mol_type = unassigned DNA
gagtctctcagctggtacacgg

SEQ ID NO: 5683 - RNA, 42 nt, synthetic construct; identical to SEQ ID NO: 4404
  misc_feature 1..42: note = Description of Artificial Sequence: Synthetic oligonucleotide
  misc_feature 1..42: note = Category: MG29-1 sgRNA targeting TRAC
  misc_feature 1..42: note = Description: MG29-1-TRAC-sgRNA-35-AltR
  source 1..42: mol_type = other RNA

SEQ ID NO: 5684 - DNA, 22 bp, unidentified
  misc_feature 1..22: note = Description of Unknown: MG29-1-TRAC-target site-35-AltR sequence
  misc_feature 1..22: note = Category: DNA sequence of TRAC target site
  source 1..22: mol_type = unassigned DNA
gagtctctcagctggtacacgg

SEQ ID NO: 5685 - RNA, 46 nt, synthetic construct
  misc_feature 1..46: note = Description of Artificial Sequence: Synthetic oligonucleotide
  misc_feature 1..46: note = Category: MG29-1 sgRNA targeting CD38
  misc_feature 1..46: note = Description: MG29-1-CD38-sgRNA
  source 1..46: mol_type = other RNA
cttttaatttctactgttgtagatccgagaccgtcctggcgcgatg

SEQ ID NO: 5686 - DNA, 22 bp, unidentified
  misc_feature 1..22: note = Description of Unknown: MG29-1-CD38-target site sequence
  misc_feature 1..22: note = Category: DNA sequence of CD38 target site
  source 1..22: mol_type = unassigned DNA
ccgagaccgtcctggcgcgatg

SEQ ID NO: 5687 - DNA, 3939 bp, synthetic construct
  misc_feature 1..3939: note = Description of Artificial Sequence: Synthetic polynucleotide
  misc_feature 1..3939: note = Category: MG29-1 coding sequence used for generation of mRNA
  misc_feature 1..3939: note = Description: MG29-1-mRNA coding sequence
  source 1..3939: mol_type = other DNA
atggcccctaagaagaagagaaaagtcggcggaggcggcagcttcaacaacttcatcaagaagtacagcctgcagaaaaccctgcgcttcgagctgaagcctgtgggcgagacagccgactacatcgaggacttcaagagcgagtacctgaaggacaccgtgctgaaggacgagcagagagccaaggactaccaagagatcaagaccctgatcgacgattaccaccgcgagtacatcgaagagtgcctgagagaacccgtggacaagaaaaccggcgagatcctggacttcacccaggacctggaagatgccttcagctactaccagaagctgaaagagaaccccaccgagaacagagtcggctgggagaaagagcaagagagcctgaggaagaagctggtcacctccttcgtgggcaacgacggcctgttcaagaaagagttcatcaccagggacctgcctgagtggctgcagaagaaaggactctggggcgagtacaaggacacagtggaaaacttcaagaagttcaccacctacttcagcggcttccacgagaaccggaagaacatgtacaccgccgaggctcagagcaccgctatcgccaacagactgatgaacgacaacctgcctaagttctttaacaactacctggcctaccagaccatcaaagagaagcaccccgacctggtgttcagactggatgatgctctgctgcaggccgctggcgtggaacatctggatgaggctttccagcctagatacttcagcagactgttcgcccagagcggcatcaccgctttcaacgagctgatcggcggcagaaccacagagaacggcgagaagatccagggcctgaacgagcagatcaacctgtacagacagcagaaccccgagaaggccaagggcttccccagattcatgcctctgttcaagcagatcctgagcgacagagagacacacagctttctgcccgacgccttcgagaacgacaaagagctgctccaggctctgagagactacgtggacgccgccacatctgaggaaggcatgatcagccagctgaacaaggccatgaaccagttcgtgaccgccgacctgaagagagtgtacatcaagagcgccgctctgaccagcctgagccaagagctgttccacttcttcggcgtgatcagcgacgctatcgcttggtacgccgagaagagactgagccccaagaaggcccaagagtctttcctgaagcaagaggtgtacgccatcgaggaactgaaccaggctgtcgtgggctacatcgaccagctggaagatcagagcgagctgcagcaactgctggtggacctgccagatcctcagaaacccgtgtccagcttcatcctgacacactggcagaagtctcaagagcccctgcaggcagtgatcgccaaggtggaacctctgttcgaactggaagaactgagcaagaacaagagggccccaaagcacgacaaggaccaaggcggcgagggatttcagcaggtcgacgccatcaagaacatgctggacgccttcatggaagtgtcccacgctatcaagcccctgtacctggtcaagggaagaaaggccatcgacatgcccgacgtggacaccggcttctacgctgatttcgccgaggcctacagcgcctacgagcaagtgacagtgtccctgtacaacaagaccagaaaccacctgtccaagaagcccttcagcaaggacaagatcaagatcaacttcgacgcccctacactgctgaacggctgggacctgaacaaagagagcgacaacaagtccatcatcctgcggaaggacggcaacttctacctggcaatcatgcaccccaagcacaccaaggtgttcgactgctactctgcctctgaggctgccggcaagtgctacgagaagatgaactacaagctgctgagcggcgccaacaagatgctgcctaaggtgttctttagcaagaagggcatcgagacattcagccctccacaagaaatcctggacctgtacaagaacaacgagcataagaagggcgccaccttcaagctggaatcctgccacaagctgatcgatttcttcaagcggaacatccccaagtacaaggtgcaccctaccgacaactttggctgggacgtgttcggctttcacttcagccctaccagcagctacggcgacctgtctggcttctacagagaggtggaagcccagggatacaagctgtggttcagcgacgtgtccgaggcttacatcaacaaatgcgtggaagagggcaagctgttcctgttccaaatctacaacaaggacttctcccctaactccaccggcaagcccaacctgcacaccctgtattggaagggcctgttcgagcccgagaacctgaaagacgtggtgctgaagctgaatggcgaggccgagatcttctaccggaagcacagcatcaagcacgaggacaagaccatccacagagctaaggaccctatcgctaacaagaacgctgacaaccccaagaaacagagcgtgttcgattacgacatcatcaaggataagcggtatacccaggacaagttcttcttccacgtgccaatcagcctgaacttcaaaagccagggcgtcgtgcggttcaacgataagatcaacggcctgctggccgctcaggacgatgtgcatgtgatcggcatcgacagaggcgagagacatctgctgtactacaccgtggtcaacggcaagggcgaagtggtggaacagggcagcctgaatcaggtggccacagatcagggctacgtggtggattaccagcagaagctgcacgccaaagagaaagaacgcgaccaggccagaaagaactggtccaccatcgagaacatcaaagaactgaaggccggctacctgagccaggtggtgcataagctggctcagctgatcgtgaagcacaacgccatcgtgtgcctcgaggacctgaatttcggcttcaagaggggcagattcaaggtcgagaaacaggtgtaccagaagttcgagaaggctctgatcgacaagctgaactacctcgtgttcaaagagagaggcgccacacaggctggcggatacctgaatgcttaccagctggccgcacctttcgagagctttgagaagctgggcaagcagaccggcatcctgtactacgtgcggagcgactacaccagcaagatcgaccctgctaccggcttcgtggactttctgaagcctaagtacgagagcatggccaagagcaaagtgttcttcgagtccttcgagcgcatccagtggaaccaggccaaaggctacttcgagttcgagtttgactacaagaagatgtgccccagcagaaagttcggcgactacagaaccagatgggtcgtgtgcaccttcggcgacacccgctaccagaacagaagaaacaagagcagcggccagtgggagacagagacaatcgatgtgacagcccagctgaaagccctgttcgccgcttacggcatcacatacaatcaagaggataacatcaaggacgccattgccgccgtgaagtacaccaagttctacaagcagctgtactggctgctgagactgaccctgagcctgagacacagcgtgacaggcaccgacgaggatttcatcctgtctccagtggccgacgagaatggcgtgttctttgactctaggaaggccaccgacaagcagcctaaggacgctgatgctaacggcgcctaccatatcgccctgaaaggcctgtggaatctccagcagatcagacagcacgactggaacgtggaaaagcccaaaaagctgaacctcgccatgaagaacgaagagtggttcggcttcgctcagaagaagaagtttagagccagcggcggcaagaggcctgccgctacaaaaaaagccggccaggccaagaaaaagaagtga

SEQ ID NO: 5688 - RNA, 46 nt, synthetic construct; identical to SEQ ID NO: 4299
  misc_feature 1..46: note = Description of Artificial Sequence: Synthetic oligonucleotide
  misc_feature 1..46: note = Category: MG29-1 sgRNA targeting mouse albumin
  misc_feature 1..46: note = Description: mAlb29-8-44
  source 1..46: mol_type = other RNA

SEQ ID NO: 5689 - RNA, 70 nt, synthetic construct
  misc_feature 1..70: note = Description of Artificial Sequence: Synthetic oligonucleotide
  misc_feature 1..70: note = Category: MG29-1 sgRNA targeting mouse albumin
  misc_feature 1..70: note = Description: mAlb29-8-50
  source 1..70: mol_type = other RNA
gttgagaatcgaaagattctcaaccttttaatttctactgttgtagatctgtaacgatcgggaactggca

SEQ ID NO: 5690 - RNA, 68 nt, synthetic construct
  misc_feature 1..68: note = Description of Artificial Sequence: Synthetic oligonucleotide
  misc_feature 1..68: note = Category: MG29-1 sgRNA targeting mouse albumin
  misc_feature 1..68: note = Description: mAlb29-8-50b
  source 1..68: mol_type = other RNA
gttgagaatcgaaagattctcaaccttttaatttctactgttgtagatctgtaacgatcgggaactgg

SEQ ID NO: 5691 - RNA, 68 nt, synthetic construct; identical to SEQ ID NO: 5690
  misc_feature 1..68: note = Description of Artificial Sequence: Synthetic oligonucleotide
  misc_feature 1..68: note = Category: MG29-1 sgRNA targeting mouse albumin
  misc_feature 1..68: note = Description: mAlb29-8-51b
  source 1..68: mol_type = other RNA

SEQ ID NO: 5692 - RNA, 68 nt, synthetic construct; identical to SEQ ID NO: 5690
  misc_feature 1..68: note = Description of Artificial Sequence: Synthetic oligonucleotide
  misc_feature 1..68: note = Category: MG29-1 sgRNA targeting mouse albumin
  misc_feature 1..68: note = Description: mAlb29-8-52b
  source 1..68: mol_type = other RNA

SEQ ID NO: 5693 - RNA, 68 nt, synthetic construct; identical to SEQ ID NO: 5690
  misc_feature 1..68: note = Description of Artificial Sequence: Synthetic oligonucleotide
  misc_feature 1..68: note = Category: MG29-1 sgRNA targeting mouse albumin
  misc_feature 1..68: note = Description: mAlb29-8-53b
  source 1..68: mol_type = other RNA

SEQ ID NO: 5694 - RNA, 68 nt, synthetic construct; identical to SEQ ID NO: 5690
  misc_feature 1..68: note = Description of Artificial Sequence: Synthetic oligonucleotide
  misc_feature 1..68: note = Category: MG29-1 sgRNA targeting mouse albumin
  misc_feature 1..68: note = Description: mAlb29-8-54b
  source 1..68: mol_type = other RNA

SEQ ID NO: 5695 - RNA, 46 nt, synthetic construct
  misc_feature 1..46: note = Description of Artificial Sequence: Synthetic oligonucleotide
  misc_feature 1..46: note = Category: Guide modification chemistry
  misc_feature 1..46: note = Description: Chemistry 44 (22 nt spacer)
  misc_difference 25..46: note = modified_base - a, c, u, g, unknown or other
  source 1..46: mol_type = other RNA
cttttaatttctactgttgtagatnnnnnnnnnnnnnnnnnnnnnn

SEQ ID NO: 5696 - RNA, 70 nt, synthetic construct
  misc_feature 1..70: note = Description of Artificial Sequence: Synthetic oligonucleotide
  misc_feature 1..70: note = Category: Guide modification chemistry
  misc_feature 1..70: note = Description: Chemistry 50 (22 nt spacer)
  misc_difference 49..70: note = modified_base - a, c, u, g, unknown or other
  source 1..70: mol_type = other RNA
gttgagaatcgaaagattctcaaccttttaatttctactgttgtagatnnnnnnnnnnnnnnnnnnnnnn

SEQ ID NO: 5697 - RNA, 68 nt, synthetic construct
  misc_feature 1..68: note = Description of Artificial Sequence: Synthetic oligonucleotide
  misc_feature 1..68: note = Category: Guide modification chemistry
  misc_feature 1..68: note = Description: Chemistry 50 (20 nt spacer)
  misc_difference 49..68: note = modified_base - a, c, u, g, unknown or other
  source 1..68: mol_type = other RNA
gttgagaatcgaaagattctcaaccttttaatttctactgttgtagatnnnnnnnnnnnnnnnnnnnn

SEQ ID NO: 5698 - RNA, 68 nt, synthetic construct; identical to SEQ ID NO: 5697
  misc_feature 1..68: note = Description of Artificial Sequence: Synthetic oligonucleotide
  misc_feature 1..68: note = Category: Guide modification chemistry
  misc_feature 1..68: note = Description: Chemistry 51 (20 nt spacer)
  misc_difference 49..68: note = modified_base - a, c, u, g, unknown or other
  source 1..68: mol_type = other RNA

SEQ ID NO: 5699 - RNA, 68 nt, synthetic construct; identical to SEQ ID NO: 5697
  misc_feature 1..68: note = Description of Artificial Sequence: Synthetic oligonucleotide
  misc_feature 1..68: note = Category: Guide modification chemistry
  misc_feature 1..68: note = Description: Chemistry 52 (20 nt spacer)
  misc_difference 49..68: note = modified_base - a, c, u, g, unknown or other
  source 1..68: mol_type = other RNA

SEQ ID NO: 5700 - RNA, 68 nt, synthetic construct; identical to SEQ ID NO: 5697
  misc_feature 1..68: note = Description of Artificial Sequence: Synthetic oligonucleotide
  misc_feature 1..68: note = Category: Guide modification chemistry
  misc_feature 1..68: note = Description: Chemistry 53 (20 nt spacer)
  misc_difference 49..68: note = modified_base - a, c, u, g, unknown or other
  source 1..68: mol_type = other RNA

SEQ ID NO: 5701 - RNA, 68 nt, synthetic construct; identical to SEQ ID NO: 5697
  misc_feature 1..68: note = Description of Artificial Sequence: Synthetic oligonucleotide
  misc_feature 1..68: note = Category: Guide modification chemistry
  misc_feature 1..68: note = Description: Chemistry 54 (20 nt spacer)
  misc_difference 49..68: note = modified_base - a, c, u, g, unknown or other
  source 1..68: mol_type = other RNA

SEQ ID NO: 5702 - RNA, 46 nt, synthetic construct; identical to SEQ ID NO: 4299
  misc_feature 1..46: note = Description of Artificial Sequence: Synthetic oligonucleotide
  misc_feature 1..46: note = Category: MG29-1 sgRNA targeting mouse albumin
  misc_feature 1..46: note = Description: mAlb29-8-37
  source 1..46: mol_type = other RNA

SEQ ID NO: 5703 - RNA, 46 nt, synthetic construct
  misc_feature 1..46: note = Description of Artificial Sequence: Synthetic oligonucleotide
  misc_feature 1..46: note = Category: MG29-1 sgRNA targeting mouse albumin
  misc_feature 1..46: note = Description: mAlb29-12-44
  source 1..46: mol_type = other RNA
cttttaatttctactgttgtagatagtgtagcagagaggaaccatt

SEQ ID NO: 5704 - RNA, 70 nt, synthetic construct
  misc_feature 1..70: note = Description of Artificial Sequence: Synthetic oligonucleotide
  misc_feature 1..70: note = Category: MG29-1 sgRNA targeting mouse HAO1
  misc_feature 1..70: note = Description: mH29-29-50
  source 1..70: mol_type = other RNA
gttgagaatcgaaagattctcaaccttttaatttctactgttgtagatccttaggagaaaatgccaaatc

SEQ ID NO: 5705 - RNA, 68 nt, synthetic construct
  misc_feature 1..68: note = Description of Artificial Sequence: Synthetic oligonucleotide
  misc_feature 1..68: note = Category: MG29-1 sgRNA targeting mouse HAO1
  misc_feature 1..68: note = Description: mH29-29-50b
  source 1..68: mol_type = other RNA
gttgagaatcgaaagattctcaaccttttaatttctactgttgtagatccttaggagaaaatgccaaa

SEQ ID NO: 5706 - RNA, 68 nt, synthetic construct; identical to SEQ ID NO: 5705
  misc_feature 1..68: note = Description of Artificial Sequence: Synthetic oligonucleotide
  misc_feature 1..68: note = Category: MG29-1 sgRNA targeting mouse HAO1
  misc_feature 1..68: note = Description: mH29-29-51b
  source 1..68: mol_type = other RNA

SEQ ID NO: 5707 - RNA, 68 nt, synthetic construct; identical to SEQ ID NO: 5705
  misc_feature 1..68: note = Description of Artificial Sequence: Synthetic oligonucleotide
  misc_feature 1..68: note = Category: MG29-1 sgRNA targeting mouse HAO1
  misc_feature 1..68: note = Description: mH29-29-52b
  source 1..68: mol_type = other RNA

SEQ ID NO: 5708 - RNA, 68 nt, synthetic construct; identical to SEQ ID NO: 5705
  misc_feature 1..68: note = Description of Artificial Sequence: Synthetic oligonucleotide
  misc_feature 1..68: note = Category: MG29-1 sgRNA targeting mouse HAO1
  misc_feature 1..68: note = Description: mH29-29-53b
  source 1..68: mol_type = other RNA

SEQ ID NO: 5709 - RNA, 68 nt, synthetic construct; identical to SEQ ID NO: 5705
  misc_feature 1..68: note = Description of Artificial Sequence: Synthetic oligonucleotide
  misc_feature 1..68: note = Category: MG29-1 sgRNA targeting mouse HAO1
  misc_feature 1..68: note = Description: mH29-29-54b
  source 1..68: mol_type = other RNA

SEQ ID NO: 5710 - RNA, 44 nt, synthetic construct
  misc_feature 1..44: note = Description of Artificial Sequence: Synthetic oligonucleotide
  misc_feature 1..44: note = Category: MG29-1 sgRNA targeting mouse HAO1
  misc_feature 1..44: note = Description: mH29-29.1_37
  source 1..44: mol_type = other RNA
cttttaatttctactgttgtagatccttaggagaaaatgccaaa

SEQ ID NO: 5711 - RNA, 44 nt, synthetic construct; identical to SEQ ID NO: 5710
  misc_feature 1..44: note = Description of Artificial Sequence: Synthetic oligonucleotide
  misc_feature 1..44: note = Category: MG29-1 sgRNA targeting mouse HAO1
  misc_feature 1..44: note = Description: mH29-29.2_37
  source 1..44: mol_type = other RNA

SEQ ID NO: 5712 - RNA, 126 nt, synthetic construct
  misc_feature 1..126: note = Description of Artificial Sequence: Synthetic polynucleotide
  misc_feature 1..126: note = Category: MG29-1 CRISPR array targeting mouse albumin
  misc_feature 1..126: note = Description: mAlb29-g8-37-array
  source 1..126: mol_type = other RNA
gtctaagaccttacttaatttctactgttgtagatctgtaacgatcgggaactggcatcttcagtctaagaccttacttaatttctactgttgtagatctgtaacgatcgggaactggcatcttca

SEQ ID NO: 5713 - RNA, 44 nt, synthetic construct
  misc_feature 1..44: note = Description of Artificial Sequence: Synthetic oligonucleotide
  misc_feature 1..44: note = Category: MG29-1 sgRNA targeting human albumin
  misc_feature 1..44: note = Description: hA29-87-37B
  source 1..44: mol_type = other RNA
cttttaatttctactgttgtagatcgcactaaggaaagtgcaaa

SEQ ID NO: 5714 - RNA, 44 nt, synthetic construct
  misc_feature 1..44: note = Description of Artificial Sequence: Synthetic oligonucleotide
  misc_feature 1..44: note = Category: MG29-1 sgRNA targeting human albumin
  misc_feature 1..44: note = Description: hA29-78-37B
  source 1..44: mol_type = other RNA
cttttaatttctactgttgtagatttttgcgcactaaggaaagt

SEQ ID NO: 5715 - RNA, 44 nt, synthetic construct
  misc_feature 1..44: note = Description of Artificial Sequence: Synthetic oligonucleotide
  misc_feature 1..44: note = Category: MG29-1 sgRNA targeting human albumin
  misc_feature 1..44: note = Description: hA29-74-37B
  source 1..44: mol_type = other RNA
cttttaatttctactgttgtagataataaagcatagtgcaatgg

SEQ ID NO: 5716 - RNA, 44 nt, synthetic construct
  misc_feature 1..44: note = Description of Artificial Sequence: Synthetic oligonucleotide
  misc_feature 1..44: note = Category: MG29-1 sgRNA targeting human albumin
  misc_feature 1..44: note = Description: hA29-83-37B
  source 1..44: mol_type = other RNA
cttttaatttctactgttgtagattgagatcaacagcacaggtt

SEQ ID NO: 5717 - RNA, 44 nt, synthetic construct
  misc_feature 1..44: note = Description of Artificial Sequence: Synthetic oligonucleotide
  misc_feature 1..44: note = Category: MG29-1 sgRNA targeting human albumin
  misc_feature 1..44: note = Description: hA29-84-37B
  source 1..44: mol_type = other RNA
cttttaatttctactgttgtagatcactttccttagtgcgcaaa

SEQ ID NO: 5718 - RNA, 44 nt, synthetic construct
  misc_feature 1..44: note = Description of Artificial Sequence: Synthetic oligonucleotide
  misc_feature 1..44: note = Category: MG29-1 sgRNA targeting human HAO1
  misc_feature 1..44: note = Description: hH29-4_37b
  source 1..44: mol_type = other RNA
cttttaatttctactgttgtagatccccagacctgtaatagtca

SEQ ID NO: 5719 - RNA, 44 nt, synthetic construct
  misc_feature 1..44: note = Description of Artificial Sequence: Synthetic oligonucleotide
  misc_feature 1..44: note = Category: MG29-1 sgRNA targeting human HAO1
  misc_feature 1..44: note = Description: hH29-21_37b
  source 1..44: mol_type = other RNA
cttttaatttctactgttgtagatggacagagggtcagcatgcc

SEQ ID NO: 5720 - RNA, 44 nt, synthetic construct
  misc_feature 1..44: note = Description of Artificial Sequence: Synthetic oligonucleotide
  misc_feature 1..44: note = Category: MG29-1 sgRNA targeting human HAO1
  misc_feature 1..44: note = Description: hH29-23_37b
  source 1..44: mol_type = other RNA
cttttaatttctactgttgtagattcagcctgtcagtccctggg

SEQ ID NO: 5721 - RNA, 44 nt, synthetic construct
  misc_feature 1..44: note = Description of Artificial Sequence: Synthetic oligonucleotide
  misc_feature 1..44: note = Category: MG29-1 sgRNA targeting human HAO1
  misc_feature 1..44: note = Description: hH29-41_37b
  source 1..44: mol_type = other RNA
cttttaatttctactgttgtagatatatcttcccagctgataga

SEQ ID NO: 5722 - RNA, 70 nt, synthetic construct
  misc_feature 1..70: note = Description of Artificial Sequence: Synthetic oligonucleotide
  misc_feature 1..70: note = Category: MG29-1 sgRNA targeting human HAO1
  misc_feature 1..70: note = Description: hH29-4_50
  source 1..70: mol_type = other RNA
gttgagaatcgaaagattctcaaccttttaatttctactgttgtagatccccagacctgtaatagtcata

SEQ ID NO: 5723 - RNA, 70 nt, synthetic construct
  misc_feature 1..70: note = Description of Artificial Sequence: Synthetic oligonucleotide
  misc_feature 1..70: note = Category: MG29-1 sgRNA targeting human HAO1
  misc_feature 1..70: note = Description: hH29-21_50
  source 1..70: mol_type = other RNA
gttgagaatcgaaagattctcaaccttttaatttctactgttgtagatggacagagggtcagcatgccaa

SEQ ID NO: 5724 - RNA, 70 nt, synthetic construct
  misc_feature 1..70: note = Description of Artificial Sequence: Synthetic oligonucleotide
  misc_feature 1..70: note = Category: MG29-1 sgRNA targeting human HAO1
  misc_feature 1..70: note = Description: hH29-23_50
  source 1..70: mol_type = other RNA
gttgagaatcgaaagattctcaaccttttaatttctactgttgtagattcagcctgtcagtccctgggaa

SEQ ID NO: 5725 - RNA, 70 nt, synthetic construct
  misc_feature 1..70: note = Description of Artificial Sequence: Synthetic oligonucleotide
  misc_feature 1..70: note = Category: MG29-1 sgRNA targeting human HAO1
  misc_feature 1..70: note = Description: hH29-41_50
  source 1..70: mol_type = other RNA
gttgagaatcgaaagattctcaaccttttaatttctactgttgtagatatatcttcccagctgatagatg

SEQ ID NO: 5726 - RNA, 68 nt, synthetic construct
  misc_feature 1..68: note = Description of Artificial Sequence: Synthetic oligonucleotide
  misc_feature 1..68: note = Category: MG29-1 sgRNA targeting human HAO1
  misc_feature 1..68: note = Description: hH29-4_50b
  source 1..68: mol_type = other RNA
gttgagaatcgaaagattctcaaccttttaatttctactgttgtagatccccagacctgtaatagtca

SEQ ID NO: 5727 - RNA, 68 nt, synthetic construct
  misc_feature 1..68: note = Description of Artificial Sequence: Synthetic oligonucleotide
  misc_feature 1..68: note = Category: MG29-1 sgRNA targeting human HAO1
  misc_feature 1..68: note = Description: hH29-21_50b
  source 1..68: mol_type = other RNA
gttgagaatcgaaagattctcaaccttttaatttctactgttgtagatggacagagggtcagcatgcc

SEQ ID NO: 5728 - RNA, 68 nt, synthetic construct
  misc_feature 1..68: note = Description of Artificial Sequence: Synthetic oligonucleotide
  misc_feature 1..68: note = Category: MG29-1 sgRNA targeting human HAO1
  misc_feature 1..68: note = Description: hH29-23_50b
  source 1..68: mol_type = other RNA
gttgagaatcgaaagattctcaaccttttaatttctactgttgtagattcagcctgtcagtccctggg

SEQ ID NO: 5729 - RNA, 68 nt, synthetic construct
  misc_feature 1..68: note = Description of Artificial Sequence: Synthetic oligonucleotide
  misc_feature 1..68: note = Category: MG29-1 sgRNA targeting human HAO1
  misc_feature 1..68: note = Description: hH29-41_50b
  source 1..68: mol_type = other RNA
gttgagaatcgaaagattctcaaccttttaatttctactgttgtagatatatcttcccagctgataga

SEQ ID NO: 5730 - RNA, 70 nt, synthetic construct; identical to SEQ ID NO: 5722
  misc_feature 1..70: note = Description of Artificial Sequence: Synthetic oligonucleotide
  misc_feature 1..70: note = Category: MG29-1 sgRNA targeting mouse HAO1
  misc_feature 1..70: note = Description: mH29-1-50
  source 1..70: mol_type = other RNA

SEQ ID NO: 5731 - RNA, 70 nt, synthetic construct
  misc_feature 1..70: note = Description of Artificial Sequence: Synthetic oligonucleotide
  misc_feature 1..70: note = Category: MG29-1 sgRNA targeting mouse HAO1
  misc_feature 1..70: note = Description: mH29-15-50
  source 1..70: mol_type = other RNA
gttgagaatcgaaagattctcaaccttttaatttctactgttgtagattgactgtggacaccccttacct

SEQ ID NO: 5732 - RNA, 68 nt, synthetic construct; identical to SEQ ID NO: 5726
  misc_feature 1..68: note = Description of Artificial Sequence: Synthetic oligonucleotide
  misc_feature 1..68: note = Category: MG29-1 sgRNA targeting mouse HAO1
  misc_feature 1..68: note = Description: mH29-1-50b
  source 1..68: mol_type = other RNA

SEQ ID NO: 5733 - RNA, 68 nt, synthetic construct
  misc_feature 1..68: note = Description of Artificial Sequence: Synthetic oligonucleotide
  misc_feature 1..68: note = Category: MG29-1 sgRNA targeting mouse HAO1
  misc_feature 1..68: note = Description: mH29-15-50b
  source 1..68: mol_type = other RNA
gttgagaatcgaaagattctcaaccttttaatttctactgttgtagattgactgtggacaccccttac

SEQ ID NO: 5734 - RNA, 100 nt, synthetic construct
  misc_feature 1..100: note = Description of Artificial Sequence: Synthetic polynucleotide
  misc_feature 1..100: note = Category: SpCas9 sgRNA targeting mouse albumin
  misc_feature 1..100: note = Description: mAlbR1 guide RNA
  source 1..100: mol_type = other RNA
ttagtatagcatggtcgagcgttttagagctagaaatagcaagttaaaataaggctagtccgttatcaacttgaaaaagtggcaccgagtcggtgctttt

SEQ ID NO: 5735 - RNA, 100 nt, synthetic construct
  misc_feature 1..100: note = Description of Artificial Sequence: Synthetic polynucleotide
  misc_feature 1..100: note = Category: SpCas9 sgRNA targeting mouse albumin
  misc_feature 1..100: note = Description: mAlbR2 guide RNA
  source 1..100: mol_type = other RNA
ttcctgtaacgatcgggaacgttttagagctagaaatagcaagttaaaataaggctagtccgttatcaacttgaaaaagtggcaccgagtcggtgctttt

SEQ ID NO: 5736 - RNA, 100 nt, synthetic construct
  misc_feature 1..100: note = Description of Artificial Sequence: Synthetic polynucleotide
  misc_feature 1..100: note = Category: SpCas9 sgRNA targeting mouse albumin
  misc_feature 1..100: note = Description: mAlbR3 guide RNA
  source 1..100: mol_type = other RNA
tgccagttcccgatcgttacgttttagagctagaaatagcaagttaaaataaggctagtccgttatcaacttgaaaaagtggcaccgagtcggtgctttt

SEQ ID NO: 5737 - DNA, 18 bp, synthetic construct
  misc_feature 1..18: note = Description of Artificial Sequence: Synthetic primer
  misc_feature 1..18: note = Category: PCR primer
  misc_feature 1..18: note = Description: mAlb90F PCR primer
  source 1..18: mol_type = other DNA
ctcctcttcgtctccggc

SEQ ID NO: 5738 - DNA, 19 bp, synthetic construct
  misc_feature 1..19: note = Description of Artificial Sequence: Synthetic primer
  misc_feature 1..19: note = Category: PCR primer
  misc_feature 1..19: note = Description: mAlb1073R PCR primer
  source 1..19: mol_type = other DNA
ctgccacattgctcagcac

SEQ ID NO: 5739 - DNA, 21 bp, synthetic construct
  misc_feature 1..21: note = Description of Artificial Sequence: Synthetic primer
  misc_feature 1..21: note = Category: PCR primer
  misc_feature 1..21: note = Description: mAlb282F PCR primer
  source 1..21: mol_type = other DNA
ttgcatctgagaacccttagg

SEQ ID NO: 5740 - DNA, 20 bp, synthetic construct
  misc_feature 1..20: note = Description of Artificial Sequence: Synthetic primer
  misc_feature 1..20: note = Category: PCR primer
  misc_feature 1..20: note = Description: mAlb460F PCR primer
  source 1..20: mol_type = other DNA
gcctgctcgaccatgctata

SEQ ID NO: 5741 - RNA, 100 nt, synthetic construct; identical to SEQ ID NO: 5735
  misc_feature 1..100: note = Description of Artificial Sequence: Synthetic polynucleotide
  misc_feature 1..100: note = Category: SpCas9 sgRNA targeting mouse albumin
  misc_feature 1..100: note = Description: mAlbR2 guide RNA with extensive chemical modifications
  source 1..100: mol_type = other RNA

SEQ ID NO: 5742 - DNA, 4493 bp, synthetic construct
  misc_feature 1..4493: note = Description of Artificial Sequence: Synthetic polynucleotide
  misc_feature 1..4493: note = Category: SpCas9 DNA sequence
  misc_feature 1..4493: note = Description: Template DNA for spCas9 in vitro transcription
  source 1..4493: mol_type = other DNA
gcggccgctaatacgactcactataagaaaagccagctccagcaggcgctgctcactcctccccatcctctccctctgtccctctgtccctctgaccctgcactgtcccagcaccatggcccccaagaagaagcggaaagttggcggcggaggcagcgacaagaagtactctatcggcctggacatcggcaccaactctgttggatgggccgtgatcaccgacgagtacaaggtgcccagcaagaaattcaaggtgctgggcaacaccgaccggcacagcatcaagaagaatctgatcggcgccctgctgttcgactctggcgaaacagccgaagccaccagactgaagagaaccgccagacggcggtacaccagaagaaagaaccggatctgctacctgcaagagatcttcagcaacgagatggccaaggtggacgacagcttcttccacagactggaagagtccttcctggtggaagaggacaagaagcacgagcggcaccccatcttcggcaacatcgtggatgaggtggcctaccacgagaagtaccccaccatctaccacctgagaaagaaactggtggacagcaccgacaaggccgacctgagactgatctatctggccctggctcacatgatcaagttccggggccacttcctgatcgagggcgacctgaatcctgacaacagcgacgtggacaagctgttcatccagctggtgcagacctacaaccagctgttcgaggaaaaccccatcaacgccagcggagtggatgccaaggccatcctgtctgccagactgagcaagagcagacggctggaaaacctgatcgctcagctgcccggcgagaagaagaatggcctgttcggcaacctgattgccctgagcctgggcctgacacctaacttcaagagcaacttcgacctggccgaggacgccaaactgcagctgtccaaggacacctacgacgacgacctggacaatctgctggcccagatcggcgatcagtacgccgacttgtttctggccgccaagaacctgtccgacgccatcctgctgagcgacatcctgagagtgaacaccgagatcacaaaggcccctctgagcgcctctatgatcaagagatacgacgagcaccaccaggatctgaccctgctgaaggccctcgttagacagcagctgcctgagaagtacaaagagattttcttcgaccagagcaagaacggctacgccggctacattgatggcggagccagccaagaggaattctacaagttcatcaagcccatcctcgagaagatggacggcaccgaggaactgctggtcaagctgaacagagaggacctgctgcggaagcagcggaccttcgacaatggctctatccctcaccagatccacctgggagagctgcacgccattctgcggagacaagaggacttttacccattcctgaaggacaaccgggaaaagattgagaagatcctgaccttcaggatcccctactacgtgggaccactggccagaggcaatagcagattcgcctggatgaccagaaagagcgaggaaaccatcacaccctggaacttcgaggaagtggtggacaagggcgccagcgctcagtccttcatcgagcggatgaccaacttcgataagaacctgcctaacgagaaggtgctgcccaagcacagcctgctgtacgagtacttcaccgtgtacaacgagctgaccaaagtgaaatacgtgaccgagggaatgagaaagcccgcctttctgagcggcgagcagaaaaaggccattgtggatctgctgttcaagaccaaccggaaagtgaccgtgaagcagctgaaagaggactacttcaagaaaatcgagtgcttcgacagcgtggaaatcagcggcgtggaagatcggttcaatgccagcctgggcacataccacgacctgctgaaaattatcaaggacaaggacttcctggacaacgaagagaacgaggacatcctggaagatatcgtgctgaccctgacactgtttgaggacagagagatgatcgaggaacggctgaaaacatacgcccacctgttcgacgacaaagtgatgaagcaactgaagcggcggagatacaccggctggggcagactgtctcggaagctgatcaacggcatccgggataagcagtccggcaagaccatcctggactttctgaagtccgacggcttcgccaacagaaacttcatgcagctgatccacgacgacagcctgacctttaaagaggatatccagaaagcccaggtgtccggccagggcgattctctgcatgagcacattgccaacctggccggctctcccgccattaagaagggcattctgcagacagtgaaggtggtggacgagctggtcaaagtcatgggcagacacaagcccgagaacatcgtgatcgaaatggccagagagaaccagaccacacagaagggccagaagaacagccgcgagagaatgaagcggatcgaagagggcatcaaagagctgggcagccagatcctgaaagaacaccccgtggaaaacacccagctgcagaacgagaagctgtacctgtactacctccagaacggccgggatatgtacgtggaccaagagctggacatcaaccggctgtccgactacgatgtggaccatatcgtgccccagtcttttctgaaggacgactccatcgacaacaaggtcctgaccagatccgacaagaatcggggcaagagcgacaacgtgccctccgaagaggtggtcaagaagatgaagaactactggcgacagctgctgaacgccaagctgattacccagcggaagttcgataacctgaccaaggccgagagaggcggcctgtctgaactggataaggccggcttcatcaagagacagctggtggaaacccggcagatcaccaaacacgtggcacagattctggactcccggatgaacactaagtacgacgagaatgacaagctgatccgggaagtgaaagtgatcaccctgaagtccaagctggtgtccgatttccggaaggatttccagttctacaaagtgcgcgagatcaacaactaccatcacgcccacgacgcctacctgaatgccgttgttggaacagccctgatcaagaagtatcccaagctggaaagcgagttcgtgtacggcgactacaaggtgtacgacgtgcggaagatgatcgccaagagcgagcaagagattggcaaggctaccgccaagtactttttctacagcaacatcatgaactttttcaagaccgagattaccctggccaacggcgagatcagaaagcggcctctgatcgagacaaacggcgaaaccggcgagattgtgtgggataagggcagagactttgccacagtgcggaaagtgctgagcatgccccaagtgaatatcgtgaagaaaaccgaggtgcagacaggcggcttcagcaaagagtccattctgcccaagagaaacagcgataagctgatcgcccggaagaaggactgggaccctaagaagtacggcggcttcgatagccctaccgtggcctattctgtgctggtggtggccaaagtggaaaagggcaagtccaagaaactcaagagcgtgaaagagctgctggggatcaccatcatggaaagaagcagcttcgagaagaatcctatcgatttcctcgaggccaagggctacaaagaagtgaaaaaggacctgatcatcaagctccccaagtactccctgttcgagctggaaaatggccggaagcggatgctggcttctgctggcgaactgcagaagggaaacgaactggccctgcctagcaaatatgtgaacttcctgtacctggccagccactatgagaagctgaagggcagccccgaggacaatgagcaaaagcagctgtttgtggaacagcacaagcactacctggacgagatcatcgagcagatcagcgagttctccaagagagtgatcctggccgacgctaatctggacaaagtgctgtccgcctacaacaagcaccgggacaagcctatcagagagcaggccgagaatatcatccacctgtttaccctgaccaatctgggagcccctgccgccttcaagtacttcgacaccaccatcgaccggaagcgctacaccagcaccaaagaggtgctggacgccacactgatccaccagtctatcaccggcctgtacgagacacggatcgacctgtctcagctcggaggcgattctggcggaaaaagacctgccgccacaaagaaagccggacaggccaagaaaaagaagtgaccacacccccattcccccactccagataaagcttcagttatatctcacgtgtctggagttaaaaaaaaaaaaaaaaaaaaaaaaaaaaaaaaaaaaaaaaaaaaaaaaaaaaaaaaaaaaaaaaaaaaaaaaaaaaaaaaaaaaaaaaaaaaaaaaaaaagaagagccctgcagg

SEQ ID NO: 5743 - protein, 1400 aa, synthetic construct
  REGION 1..1400: note = Description of Artificial Sequence: Synthetic polypeptide
  REGION 1..1400: note = Category: SpCas9 protein sequence
  REGION 1..1400: note = Description: Amino acid sequence of spCas9 encoded in mRNA inclusing nuclear localization signals
MAPKKKRKVGGGGSDKKYSIGLDIGTNSVGWAVITDEYKVPSKKFKVLGNTDRHSIKKNLIGALLFDSGETAEATRLKRTARRRYTRRKNRICYLQEIFSNEMAKVDDSFFHRLEESFLVEEDKKHERHPIFGNIVDEVAYHEKYPTIYHLRKKLVDSTDKADLRLIYLALAHMIKFRGHFLIEGDLNPDNSDVDKLFIQLVQTYNQLFEENPINASGVDAKAILSARLSKSRRLENLIAQLPGEKKNGLFGNLIALSLGLTPNFKSNFDLAEDAKLQLSKDTYDDDLDNLLAQIGDQYADLFLAAKNLSDAILLSDILRVNTEITKAPLSASMIKRYDEHHQDLTLLKALVRQQLPEKYKEIFFDQSKNGYAGYIDGGASQEEFYKFIKPILEKMDGTEELLVKLNREDLLRKQRTFDNGSIPHQIHLGELHAILRRQEDFYPFLKDNREKIEKILTFRIPYYVGPLARGNSRFAWMTRKSEETITPWNFEEVVDKGASAQSFIERMTNFDKNLPNEKVLPKHSLLYEYFTVYNELTKVKYVTEGMRKPAFLSGEQKKAIVDLLFKTNRKVTVKQLKEDYFKKIECFDSVEISGVEDRFNASLGTYHDLLKIIKDKDFLDNEENEDILEDIVLTLTLFEDREMIEERLKTYAHLFDDKVMKQLKRRRYTGWGRLSRKLINGIRDKQSGKTILDFLKSDGFANRNFMQLIHDDSLTFKEDIQKAQVSGQGDSLHEHIANLAGSPAIKKGILQTVKVVDELVKVMGRHKPENIVIEMARENQTTQKGQKNSRERMKRIEEGIKELGSQILKEHPVENTQLQNEKLYLYYLQNGRDMYVDQELDINRLSDYDVDHIVPQSFLKDDSIDNKVLTRSDKNRGKSDNVPSEEVVKKMKNYWRQLLNAKLITQRKFDNLTKAERGGLSELDKAGFIKRQLVETRQITKHVAQILDSRMNTKYDENDKLIREVKVITLKSKLVSDFRKDFQFYKVREINNYHHAHDAYLNAVVGTALIKKYPKLESEFVYGDYKVYDVRKMIAKSEQEIGKATAKYFFYSNIMNFFKTEITLANGEIRKRPLIETNGETGEIVWDKGRDFATVRKVLSMPQVNIVKKTEVQTGGFSKESILPKRNSDKLIARKKDWDPKKYGGFDSPTVAYSVLVVAKVEKGKSKKLKSVKELLGITIMERSSFEKNPIDFLEAKGYKEVKKDLIIKLPKYSLFELENGRKRMLASAGELQKGNELALPSKYVNFLYLASHYEKLKGSPEDNEQKQLFVEQHKHYLDEIIEQISEFSKRVILADANLDKVLSAYNKHRDKPIREQAENIIHLFTLTNLGAPAAFKYFDTTIDRKRYTSTKEVLDATLIHQSITGLYETRIDLSQLGGDSGGKRPAATKKAGQAKKKK

SEQ ID NO: 5744 - RNA, 70 nt, synthetic construct; identical to SEQ ID NO: 5689
  misc_feature 1..70: note = Description of Artificial Sequence: Synthetic oligonucleotide
  misc_feature 1..70: note = Category: MG29-1 sgRNA targeting mouse albumin
  misc_feature 1..70: note = Description: mAlb29-8-50 guide RNA
  source 1..70: mol_type = other RNA

SEQ ID NO: 5745 - RNA, 46 nt, synthetic construct; identical to SEQ ID NO: 4299
  misc_feature 1..46: note = Description of Artificial Sequence: Synthetic oligonucleotide
  misc_feature 1..46: note = Category: Guide RNA
  misc_feature 1..46: note = Description: mAlb298-40
  source 1..46: mol_type = other RNA

SEQ ID NO: 5746 - DNA, 46 bp, synthetic construct; identical to SEQ ID NO: 4313
  misc_feature 1..46: note = Description of Artificial Sequence: Synthetic oligonucleotide
  misc_feature 1..46: note = Category: Guide RNA
  misc_feature 1..46: note = Description: mAlb298-41
  source 1..46: mol_type = other DNA
  misc_feature 1..18: note = RNA
  misc_feature 19..24: note = DNA
  misc_feature 25..46: note = RNA

SEQ ID NO: 5747 - RNA, 46 nt, synthetic construct; identical to SEQ ID NO: 4299
  misc_feature 1..46: note = Description of Artificial Sequence: Synthetic oligonucleotide
  misc_feature 1..46: note = Category: Guide RNA
  misc_feature 1..46: note = Description: mAlb298-42
  source 1..46: mol_type = other RNA

SEQ ID NO: 5748 - RNA, 46 nt, synthetic construct; identical to SEQ ID NO: 4299
  misc_feature 1..46: note = Description of Artificial Sequence: Synthetic oligonucleotide
  misc_feature 1..46: note = Category: Guide RNA
  misc_feature 1..46: note = Description: mAlb298-43
  source 1..46: mol_type = other RNA

SEQ ID NO: 5749 - RNA, 46 nt, synthetic construct; identical to SEQ ID NO: 4299
  misc_feature 1..46: note = Description of Artificial Sequence: Synthetic oligonucleotide
  misc_feature 1..46: note = Category: Guide RNA
  misc_feature 1..46: note = Description: mAlb298-44
  source 1..46: mol_type = other RNA

SEQ ID NO: 5750 - RNA, 46 nt, synthetic construct; identical to SEQ ID NO: 4299
  misc_feature 1..46: note = Description of Artificial Sequence: Synthetic oligonucleotide
  misc_feature 1..46: note = Category: Guide RNA
  misc_feature 1..46: note = Description: mAlb298-37
  source 1..46: mol_type = other RNA

SEQ ID NO: 5751 - RNA, 70 nt, synthetic construct; identical to SEQ ID NO: 5689
  misc_feature 1..70: note = Description of Artificial Sequence: Synthetic oligonucleotide
  misc_feature 1..70: note = Category: Guide RNA
  misc_feature 1..70: note = Description: mAlb29-8-50
  source 1..70: mol_type = other RNA

SEQ ID NO: 5752 - RNA, 70 nt, synthetic construct; identical to SEQ ID NO: 5689
  misc_feature 1..70: note = Description of Artificial Sequence: Synthetic oligonucleotide
  misc_feature 1..70: note = Category: Guide RNA
  misc_feature 1..70: note = Description: mAlb29-8-49
  source 1..70: mol_type = other RNA

SEQ ID NO: 5753 - RNA, 88 nt, synthetic construct
  misc_feature 1..88: note = Description of Artificial Sequence: Synthetic oligonucleotide
  misc_feature 1..88: note = Category: Guide RNA
  misc_feature 1..88: note = Description: mAlb29-8-48
  source 1..88: mol_type = other RNA
gttgagaatcgaaagattcttaataaggcatccttccgatgccttttaatttctactgttgtagatctgtaacgatcgggaactggca

SEQ ID NO: 5754 - RNA, 88 nt, synthetic construct; identical to SEQ ID NO: 5753
  misc_feature 1..88: note = Description of Artificial Sequence: Synthetic oligonucleotide
  misc_feature 1..88: note = Category: Guide RNA
  misc_feature 1..88: note = Description: mAlb29-8-47
  source 1..88: mol_type = other RNA

SEQ ID NO: 5755 - RNA, 88 nt, synthetic construct; identical to SEQ ID NO: 5753
  misc_feature 1..88: note = Description of Artificial Sequence: Synthetic oligonucleotide
  misc_feature 1..88: note = Category: Guide RNA
  misc_feature 1..88: note = Description: mAlb29-8-46
  source 1..88: mol_type = other RNA

SEQ ID NO: 5756 - RNA, 46 nt, synthetic construct; identical to SEQ ID NO: 4299
  misc_feature 1..46: note = Description of Artificial Sequence: Synthetic oligonucleotide
  misc_feature 1..46: note = Category: Guide RNA
  misc_feature 1..46: note = Description: mAlb298-37
  source 1..46: mol_type = other RNA

SEQ ID NO: 5757 - RNA, 46 nt, synthetic construct; identical to SEQ ID NO: 5703
  misc_feature 1..46: note = Description of Artificial Sequence: Synthetic oligonucleotide
  misc_feature 1..46: note = Category: Guide RNA
  misc_feature 1..46: note = Description: mAlb2912-37
  source 1..46: mol_type = other RNA

SEQ ID NO: 5758 - RNA, 46 nt, synthetic construct
  misc_feature 1..46: note = Description of Artificial Sequence: Synthetic oligonucleotide
  misc_feature 1..46: note = Category: Guide RNA
  misc_feature 1..46: note = Description: mAlb2918-37
  source 1..46: mol_type = other RNA
cttttaatttctactgttgtagataagattgatgaagacaactaac

SEQ ID NO: 5759 - RNA, 44 nt, synthetic construct; identical to SEQ ID NO: 4272
  misc_feature 1..44: note = Description of Artificial Sequence: Synthetic oligonucleotide
  misc_feature 1..44: note = Category: Guide RNA
  misc_feature 1..44: note = Description: mAlb298-34
  source 1..44: mol_type = other RNA

SEQ ID NO: 5760 - DNA, 18 bp, synthetic construct
  misc_feature 1..18: note = Description of Artificial Sequence: Synthetic primer
  misc_feature 1..18: note = Category: Primer
  misc_feature 1..18: note = Description: mAlb90F
  source 1..18: mol_type = other DNA
ctcctcttcgtctccggc

SEQ ID NO: 5761 - DNA, 19 bp, synthetic construct
  misc_feature 1..19: note = Description of Artificial Sequence: Synthetic primer
  misc_feature 1..19: note = Category: Primer
  misc_feature 1..19: note = Description: mAlb1073
  source 1..19: mol_type = other DNA
ctgccacattgctcagcac

SEQ ID NO: 5762 - DNA, 20 bp, synthetic construct
  misc_feature 1..20: note = Description of Artificial Sequence: Synthetic primer
  misc_feature 1..20: note = Category: Primer
  misc_feature 1..20: note = Description: mALb460F
  source 1..20: mol_type = other DNA
gcctgctcgaccatgctata

SEQ ID NO: 5763 - DNA, 22 bp, synthetic construct
  misc_feature 1..22: note = Description of Artificial Sequence: Synthetic oligonucleotide
  misc_feature 1..22: note = Category: Guide RNA
  misc_feature 1..22: note = Description: mH29-1
  source 1..22: mol_type = other DNA
ccccagacctgtaatagtcata

SEQ ID NO: 5764 - DNA, 22 bp, synthetic construct
  misc_feature 1..22: note = Description of Artificial Sequence: Synthetic oligonucleotide
  misc_feature 1..22: note = Category: Guide RNA
  misc_feature 1..22: note = Description: mH29-15
  source 1..22: mol_type = other DNA
tgactgtggacaccccttacct

SEQ ID NO: 5765 - DNA, 22 bp, synthetic construct
  misc_feature 1..22: note = Description of Artificial Sequence: Synthetic oligonucleotide
  misc_feature 1..22: note = Category: Guide RNA
  misc_feature 1..22: note = Description: mH29-16
  source 1..22: mol_type = other DNA
attacagcctgtcagaccatgg

SEQ ID NO: 5766 - DNA, 22 bp, synthetic construct
  misc_feature 1..22: note = Description of Artificial Sequence: Synthetic oligonucleotide
  misc_feature 1..22: note = Category: Guide RNA
  misc_feature 1..22: note = Description: mH29-26
  source 1..22: mol_type = other DNA
tccatttcattacagcctgtca

SEQ ID NO: 5767 - DNA, 22 bp, synthetic construct
  misc_feature 1..22: note = Description of Artificial Sequence: Synthetic oligonucleotide
  misc_feature 1..22: note = Category: Guide RNA
  misc_feature 1..22: note = Description: mH29-29
  source 1..22: mol_type = other DNA
ccttaggagaaaatgccaaatc

SEQ ID NO: 5768 - DNA, 20 bp, synthetic construct
  misc_feature 1..20: note = Description of Artificial Sequence: Synthetic primer
  misc_feature 1..20: note = Category: Primer
  misc_feature 1..20: note = Description: PCR_mHE1_F_+233
  source 1..20: mol_type = other DNA
gtgaccaaccctacccgttt

SEQ ID NO: 5769 - DNA, 20 bp, synthetic construct
  misc_feature 1..20: note = Description of Artificial Sequence: Synthetic primer
  misc_feature 1..20: note = Category: Primer
  misc_feature 1..20: note = Description: PCR_mHE1_R_-553
  source 1..20: mol_type = other DNA
gcaagcacctactgtctcgt

SEQ ID NO: 5770 - DNA, 24 bp, synthetic construct
  misc_feature 1..24: note = Description of Artificial Sequence: Synthetic primer
  misc_feature 1..24: note = Category: Primer
  misc_feature 1..24: note = Description: Seq_mHE1_F_+139
  source 1..24: mol_type = other DNA
gtctaggcatacaatgtttgctca

SEQ ID NO: 5771 - DNA, 20 bp, synthetic construct
  misc_feature 1..20: note = Description of Artificial Sequence: Synthetic primer
  misc_feature 1..20: note = Category: Primer
  misc_feature 1..20: note = Description: HAO1_E2_F5721
  source 1..20: mol_type = other DNA
caacgaaggttccctccagg

SEQ ID NO: 5772 - DNA, 20 bp, synthetic construct
  misc_feature 1..20: note = Description of Artificial Sequence: Synthetic primer
  misc_feature 1..20: note = Category: Primer
  misc_feature 1..20: note = Description: HAO1_E2_R6271
  source 1..20: mol_type = other DNA
ggaagggtgttcgagaagga

SEQ ID NO: 5773 - DNA, 23 bp, synthetic construct
  misc_feature 1..23: note = Description of Artificial Sequence: Synthetic primer
  misc_feature 1..23: note = Category: Primer
  misc_feature 1..23: note = Description: 5938F Seq_HAO1_E2
  source 1..23: mol_type = other DNA
ctatgcaaggaaaagatttggcc

SEQ ID NO: 5774 - DNA, 20 bp, synthetic construct
  misc_feature 1..20: note = Description of Artificial Sequence: Synthetic primer
  misc_feature 1..20: note = Category: Primer
  misc_feature 1..20: note = Description: HAO1_E3_F23198
  source 1..20: mol_type = other DNA
tgccctagacaagctgacac

SEQ ID NO: 5775 - DNA, 20 bp, synthetic construct
  misc_feature 1..20: note = Description of Artificial Sequence: Synthetic primer
  misc_feature 1..20: note = Category: Primer
  misc_feature 1..20: note = Description: HAO1_E3_R23879
  source 1..20: mol_type = other DNA
cagattctggaagtggccca

SEQ ID NO: 5776 - DNA, 21 bp, synthetic construct
  misc_feature 1..21: note = Description of Artificial Sequence: Synthetic primer
  misc_feature 1..21: note = Category: Primer
  misc_feature 1..21: note = Description: PCR_mHE4_F_+300
  source 1..21: mol_type = other DNA
ggctggctgaaaatagcatcc

SEQ ID NO: 5777 - DNA, 20 bp, synthetic construct
  misc_feature 1..20: note = Description of Artificial Sequence: Synthetic primer
  misc_feature 1..20: note = Category: Primer
  misc_feature 1..20: note = Description: HAO1_E4_R31650
  source 1..20: mol_type = other DNA
aggtttggttcccctcacct

SEQ ID NO: 5778 - DNA, 22 bp, synthetic construct
  misc_feature 1..22: note = Description of Artificial Sequence: Synthetic primer
  misc_feature 1..22: note = Category: Primer
  misc_feature 1..22: note = Description: PCR_mHE4_R_-149
  source 1..22: mol_type = other DNA
tctgccatgaaggcatatggac

SEQ ID NO: 5779 - RNA, 46 nt, synthetic construct
  misc_feature 1..46: note = Description of Artificial Sequence: Synthetic oligonucleotide
  misc_feature 1..46: note = Category: Guide RNA
  misc_feature 1..46: note = Description: mH29-1_37
  source 1..46: mol_type = other RNA
cttttaatttctactgttgtagatccccagacctgtaatagtcata

SEQ ID NO: 5780 - RNA, 46 nt, synthetic construct
  misc_feature 1..46: note = Description of Artificial Sequence: Synthetic oligonucleotide
  misc_feature 1..46: note = Category: Guide RNA
  misc_feature 1..46: note = Description: mH29-15_37
  source 1..46: mol_type = other RNA
cttttaatttctactgttgtagattgactgtggacaccccttacct

SEQ ID NO: 5781 - RNA, 46 nt, synthetic construct
  misc_feature 1..46: note = Description of Artificial Sequence: Synthetic oligonucleotide
  misc_feature 1..46: note = Category: Guide RNA
  misc_feature 1..46: note = Description: mH29-29_37
  source 1..46: mol_type = other RNA
cttttaatttctactgttgtagatccttaggagaaaatgccaaatc

SEQ ID NO: 5782 - DNA, 40 bp, synthetic construct
  misc_feature 1..40: note = Description of Artificial Sequence: Synthetic primer
  misc_feature 1..40: note = Category: Primer
  misc_feature 1..40: note = Description: mAlb298_NGS_F
  misc_difference 14..18: note = modified_base - a, c, t, g, unknown or other
  source 1..40: mol_type = other DNA
gctcttccgatctnnnnncttgagtttgaatgcacagata

SEQ ID NO: 5783 - DNA, 40 bp, synthetic construct
  misc_feature 1..40: note = Description of Artificial Sequence: Synthetic primer
  misc_feature 1..40: note = Category: Primer
  misc_feature 1..40: note = Description: mAlb298_NGS_R
  misc_difference 14..18: note = modified_base - a, c, t, g, unknown or other
  source 1..40: mol_type = other DNA
gctcttccgatctnnnnntggaaacagggagagaaaaacc

SEQ ID NO: 5784 - DNA, 41 bp, synthetic construct
  misc_feature 1..41: note = Description of Artificial Sequence: Synthetic primer
  misc_feature 1..41: note = Category: Primer
  misc_feature 1..41: note = Description: mAlb2912_NGS_F
  misc_difference 14..18: note = modified_base - a, c, t, g, unknown or other
  source 1..41: mol_type = other DNA
gctcttccgatctnnnnntacaaacatgacagaaacactaa

SEQ ID NO: 5785 - DNA, 41 bp, synthetic construct
  misc_feature 1..41: note = Description of Artificial Sequence: Synthetic primer
  misc_feature 1..41: note = Category: Primer
  misc_feature 1..41: note = Description: mAlb2912_NGS_R
  misc_difference 14..18: note = modified_base - a, c, t, g, unknown or other
  source 1..41: mol_type = other DNA
gctcttccgatctnnnnngattgatgaagacaactaactgt

SEQ ID NO: 5786 - DNA, 38 bp, synthetic construct
  misc_feature 1..38: note = Description of Artificial Sequence: Synthetic primer
  misc_feature 1..38: note = Category: Primer
  misc_feature 1..38: note = Description: mAlb2918_NGS_F
  misc_difference 14..18: note = modified_base - a, c, t, g, unknown or other
  source 1..38: mol_type = other DNA
gctcttccgatctnnnnnctttgagtgtagcagagagg

SEQ ID NO: 5787 - DNA, 38 bp, synthetic construct
  misc_feature 1..38: note = Description of Artificial Sequence: Synthetic primer
  misc_feature 1..38: note = Category: Primer
  misc_feature 1..38: note = Description: mAlb2918_NGS_R
  misc_difference 14..18: note = modified_base - a, c, t, g, unknown or other
  source 1..38: mol_type = other DNA
gctcttccgatctnnnnncattataccgatgggcgatc

SEQ ID NO: 5788 - RNA, 42 nt, synthetic construct
  misc_feature 1..42: note = Description of Artificial Sequence: Synthetic oligonucleotide
  misc_feature 1..42: note = Category: MG29-1 sgRNA targeting human HAO-1
  misc_feature 1..42: note = Description: hH29-1
  source 1..42: mol_type = other RNA
taatttctactgttgtagatgcatgttgttcataatcattga

SEQ ID NO: 5789 - RNA, 42 nt, synthetic construct
  misc_feature 1..42: note = Description of Artificial Sequence: Synthetic oligonucleotide
  misc_feature 1..42: note = Category: MG29-1 sgRNA targeting human HAO-1
  misc_feature 1..42: note = Description: hH29-2
  source 1..42: mol_type = other RNA
taatttctactgttgtagatgaagtactgatttagcatgttg

SEQ ID NO: 5790 - RNA, 42 nt, synthetic construct
  misc_feature 1..42: note = Description of Artificial Sequence: Synthetic oligonucleotide
  misc_feature 1..42: note = Category: MG29-1 sgRNA targeting human HAO-1
  misc_feature 1..42: note = Description: hH29-3
  source 1..42: mol_type = other RNA
taatttctactgttgtagattatcaatgattatgaacaacat

SEQ ID NO: 5791 - RNA, 42 nt, synthetic construct
  misc_feature 1..42: note = Description of Artificial Sequence: Synthetic oligonucleotide
  misc_feature 1..42: note = Category: MG29-1 sgRNA targeting human HAO-1
  misc_feature 1..42: note = Description: hH29-4
  source 1..42: mol_type = other RNA
taatttctactgttgtagatccccagacctgtaatagtcata

SEQ ID NO: 5792 - RNA, 42 nt, synthetic construct
  misc_feature 1..42: note = Description of Artificial Sequence: Synthetic oligonucleotide
  misc_feature 1..42: note = Category: MG29-1 sgRNA targeting human HAO-1
  misc_feature 1..42: note = Description: hH29-5
  source 1..42: mol_type = other RNA
taatttctactgttgtagatttcatcatttgccccagacctg

SEQ ID NO: 5793 - RNA, 42 nt, synthetic construct
  misc_feature 1..42: note = Description of Artificial Sequence: Synthetic oligonucleotide
  misc_feature 1..42: note = Category: MG29-1 sgRNA targeting human HAO-1
  misc_feature 1..42: note = Description: hH29-6
  source 1..42: mol_type = other RNA
taatttctactgttgtagatttacctggaaaatgctgcaata

SEQ ID NO: 5794 - RNA, 42 nt, synthetic construct
  misc_feature 1..42: note = Description of Artificial Sequence: Synthetic oligonucleotide
  misc_feature 1..42: note = Category: MG29-1 sgRNA targeting human HAO-1
  misc_feature 1..42: note = Description: hH29-7
  source 1..42: mol_type = other RNA
taatttctactgttgtagatcttacctggaaaatgctgcaat

SEQ ID NO: 5795 - RNA, 42 nt, synthetic construct
  misc_feature 1..42: note = Description of Artificial Sequence: Synthetic oligonucleotide
  misc_feature 1..42: note = Category: MG29-1 sgRNA targeting human HAO-1
  misc_feature 1..42: note = Description: hH29-8
  source 1..42: mol_type = other RNA
taatttctactgttgtagatgctgataatattgcagcatttt

SEQ ID NO: 5796 - RNA, 42 nt, synthetic construct
  misc_feature 1..42: note = Description of Artificial Sequence: Synthetic oligonucleotide
  misc_feature 1..42: note = Category: MG29-1 sgRNA targeting human HAO-1
  misc_feature 1..42: note = Description: hH29-9
  source 1..42: mol_type = other RNA
taatttctactgttgtagataaaaataaattttcttacctgg

SEQ ID NO: 5797 - RNA, 42 nt, synthetic construct
  misc_feature 1..42: note = Description of Artificial Sequence: Synthetic oligonucleotide
  misc_feature 1..42: note = Category: MG29-1 sgRNA targeting human HAO-1
  misc_feature 1..42: note = Description: hH29-10
  source 1..42: mol_type = other RNA
taatttctactgttgtagataaaaaataaattttcttacctg

SEQ ID NO: 5798 - RNA, 42 nt, synthetic construct
  misc_feature 1..42: note = Description of Artificial Sequence: Synthetic oligonucleotide
  misc_feature 1..42: note = Category: MG29-1 sgRNA targeting human HAO-1
  misc_feature 1..42: note = Description: hH29-11
  source 1..42: mol_type = other RNA
taatttctactgttgtagatattttattttttaattctagat

SEQ ID NO: 5799 - RNA, 42 nt, synthetic construct
  misc_feature 1..42: note = Description of Artificial Sequence: Synthetic oligonucleotide
  misc_feature 1..42: note = Category: MG29-1 sgRNA targeting human HAO-1
  misc_feature 1..42: note = Description: hH29-12
  source 1..42: mol_type = other RNA
taatttctactgttgtagatttttattttttaattctagatg

SEQ ID NO: 5800 - RNA, 42 nt, synthetic construct
  misc_feature 1..42: note = Description of Artificial Sequence: Synthetic oligonucleotide
  misc_feature 1..42: note = Category: MG29-1 sgRNA targeting human HAO-1
  misc_feature 1..42: note = Description: hH29-13
  source 1..42: mol_type = other RNA
taatttctactgttgtagatattttttaattctagatggaag

SEQ ID NO: 5801 - RNA, 42 nt, synthetic construct
  misc_feature 1..42: note = Description of Artificial Sequence: Synthetic oligonucleotide
  misc_feature 1..42: note = Category: MG29-1 sgRNA targeting human HAO-1
  misc_feature 1..42: note = Description: hH29-14
  source 1..42: mol_type = other RNA
taatttctactgttgtagatttttttaattctagatggaagc

SEQ ID NO: 5802 - RNA, 42 nt, synthetic construct
  misc_feature 1..42: note = Description of Artificial Sequence: Synthetic oligonucleotide
  misc_feature 1..42: note = Category: MG29-1 sgRNA targeting human HAO-1
  misc_feature 1..42: note = Description: hH29-15
  source 1..42: mol_type = other RNA
taatttctactgttgtagatttaattctagatggaagctgta

SEQ ID NO: 5803 - RNA, 42 nt, synthetic construct
  misc_feature 1..42: note = Description of Artificial Sequence: Synthetic oligonucleotide
  misc_feature 1..42: note = Category: MG29-1 sgRNA targeting human HAO-1
  misc_feature 1..42: note = Description: hH29-16
  source 1..42: mol_type = other RNA
taatttctactgttgtagattaattctagatggaagctgtat

SEQ ID NO: 5804 - RNA, 42 nt, synthetic construct
  misc_feature 1..42: note = Description of Artificial Sequence: Synthetic oligonucleotide
  misc_feature 1..42: note = Category: MG29-1 sgRNA targeting human HAO-1
  misc_feature 1..42: note = Description: hH29-17
  source 1..42: mol_type = other RNA
taatttctactgttgtagataattctagatggaagctgtatc

SEQ ID NO: 5805 - RNA, 42 nt, synthetic construct
  misc_feature 1..42: note = Description of Artificial Sequence: Synthetic oligonucleotide
  misc_feature 1..42: note = Category: MG29-1 sgRNA targeting human HAO-1
  misc_feature 1..42: note = Description: hH29-18
  source 1..42: mol_type = other RNA
taatttctactgttgtagatattctagatggaagctgtatcc

SEQ ID NO: 5806 - RNA, 42 nt, synthetic construct
  misc_feature 1..42: note = Description of Artificial Sequence: Synthetic oligonucleotide
  misc_feature 1..42: note = Category: MG29-1 sgRNA targeting human HAO-1
  misc_feature 1..42: note = Description: hH29-19
  source 1..42: mol_type = other RNA
taatttctactgttgtagatagcaacattccggagcatcctt

SEQ ID NO: 5807 - RNA, 42 nt, synthetic construct
  misc_feature 1..42: note = Description of Artificial Sequence: Synthetic oligonucleotide
  misc_feature 1..42: note = Category: MG29-1 sgRNA targeting human HAO-1
  misc_feature 1..42: note = Description: hH29-20
  source 1..42: mol_type = other RNA
taatttctactgttgtagataggacagagggtcagcatgcca

SEQ ID NO: 5808 - RNA, 42 nt, synthetic construct
  misc_feature 1..42: note = Description of Artificial Sequence: Synthetic oligonucleotide
  misc_feature 1..42: note = Category: MG29-1 sgRNA targeting human HAO-1
  misc_feature 1..42: note = Description: hH29-21
  source 1..42: mol_type = other RNA
taatttctactgttgtagatggacagagggtcagcatgccaa

SEQ ID NO: 5809 - RNA, 42 nt, synthetic construct
  misc_feature 1..42: note = Description of Artificial Sequence: Synthetic oligonucleotide
  misc_feature 1..42: note = Category: MG29-1 sgRNA targeting human HAO-1
  misc_feature 1..42: note = Description: hH29-22
  source 1..42: mol_type = other RNA
taatttctactgttgtagattttctcagcctgtcagtccctg

SEQ ID NO: 5810 - RNA, 42 nt, synthetic construct
  misc_feature 1..42: note = Description of Artificial Sequence: Synthetic oligonucleotide
  misc_feature 1..42: note = Category: MG29-1 sgRNA targeting human HAO-1
  misc_feature 1..42: note = Description: hH29-23
  source 1..42: mol_type = other RNA
taatttctactgttgtagattcagcctgtcagtccctgggaa

SEQ ID NO: 5811 - RNA, 42 nt, synthetic construct
  misc_feature 1..42: note = Description of Artificial Sequence: Synthetic oligonucleotide
  misc_feature 1..42: note = Category: MG29-1 sgRNA targeting human HAO-1
  misc_feature 1..42: note = Description: hH29-24
  source 1..42: mol_type = other RNA
taatttctactgttgtagattgacagtggacacaccttacct

SEQ ID NO: 5812 - RNA, 42 nt, synthetic construct
  misc_feature 1..42: note = Description of Artificial Sequence: Synthetic oligonucleotide
  misc_feature 1..42: note = Category: MG29-1 sgRNA targeting human HAO-1
  misc_feature 1..42: note = Description: hH29-25
  source 1..42: mol_type = other RNA
taatttctactgttgtagataatctgttacgcacatcatcca

SEQ ID NO: 5813 - RNA, 42 nt, synthetic construct
  misc_feature 1..42: note = Description of Artificial Sequence: Synthetic oligonucleotide
  misc_feature 1..42: note = Category: MG29-1 sgRNA targeting human HAO-1
  misc_feature 1..42: note = Description: hH29-26
  source 1..42: mol_type = other RNA
taatttctactgttgtagatatgcatttcttattttaggatg

SEQ ID NO: 5814 - RNA, 42 nt, synthetic construct
  misc_feature 1..42: note = Description of Artificial Sequence: Synthetic oligonucleotide
  misc_feature 1..42: note = Category: MG29-1 sgRNA targeting human HAO-1
  misc_feature 1..42: note = Description: hH29-27
  source 1..42: mol_type = other RNA
taatttctactgttgtagattgcatttcttattttaggatga

SEQ ID NO: 5815 - RNA, 42 nt, synthetic construct
  misc_feature 1..42: note = Description of Artificial Sequence: Synthetic oligonucleotide
  misc_feature 1..42: note = Category: MG29-1 sgRNA targeting human HAO-1
  misc_feature 1..42: note = Description: hH29-28
  source 1..42: mol_type = other RNA
taatttctactgttgtagatttattttaggatgaaaaatttt

SEQ ID NO: 5816 - RNA, 42 nt, synthetic construct
  misc_feature 1..42: note = Description of Artificial Sequence: Synthetic oligonucleotide
  misc_feature 1..42: note = Category: MG29-1 sgRNA targeting human HAO-1
  misc_feature 1..42: note = Description: hH29-29
  source 1..42: mol_type = other RNA
taatttctactgttgtagataggatgaaaaattttgaaacca

SEQ ID NO: 5817 - RNA, 42 nt, synthetic construct
  misc_feature 1..42: note = Description of Artificial Sequence: Synthetic oligonucleotide
  misc_feature 1..42: note = Category: MG29-1 sgRNA targeting human HAO-1
  misc_feature 1..42: note = Description: hH29-30
  source 1..42: mol_type = other RNA
taatttctactgttgtagatggatgaaaaattttgaaaccag

SEQ ID NO: 5818 - RNA, 42 nt, synthetic construct
  misc_feature 1..42: note = Description of Artificial Sequence: Synthetic oligonucleotide
  misc_feature 1..42: note = Category: MG29-1 sgRNA targeting human HAO-1
  misc_feature 1..42: note = Description: hH29-31
  source 1..42: mol_type = other RNA
taatttctactgttgtagatctcaggagaaaatgataaagta

SEQ ID NO: 5819 - RNA, 42 nt, synthetic construct
  misc_feature 1..42: note = Description of Artificial Sequence: Synthetic oligonucleotide
  misc_feature 1..42: note = Category: MG29-1 sgRNA targeting human HAO-1
  misc_feature 1..42: note = Description: hH29-32
  source 1..42: mol_type = other RNA
taatttctactgttgtagatcctcaggagaaaatgataaagt

SEQ ID NO: 5820 - RNA, 42 nt, synthetic construct
  misc_feature 1..42: note = Description of Artificial Sequence: Synthetic oligonucleotide
  misc_feature 1..42: note = Category: MG29-1 sgRNA targeting human HAO-1
  misc_feature 1..42: note = Description: hH29-33
  source 1..42: mol_type = other RNA
taatttctactgttgtagatgaaaccagtactttatcatttt

SEQ ID NO: 5821 - RNA, 42 nt, synthetic construct
  misc_feature 1..42: note = Description of Artificial Sequence: Synthetic oligonucleotide
  misc_feature 1..42: note = Category: MG29-1 sgRNA targeting human HAO-1
  misc_feature 1..42: note = Description: hH29-34
  source 1..42: mol_type = other RNA
taatttctactgttgtagataaaccagtactttatcattttc

SEQ ID NO: 5822 - RNA, 42 nt, synthetic construct
  misc_feature 1..42: note = Description of Artificial Sequence: Synthetic oligonucleotide
  misc_feature 1..42: note = Category: MG29-1 sgRNA targeting human HAO-1
  misc_feature 1..42: note = Description: hH29-35
  source 1..42: mol_type = other RNA
taatttctactgttgtagattcattttctcctgaggaaaatt

SEQ ID NO: 5823 - RNA, 42 nt, synthetic construct
  misc_feature 1..42: note = Description of Artificial Sequence: Synthetic oligonucleotide
  misc_feature 1..42: note = Category: MG29-1 sgRNA targeting human HAO-1
  misc_feature 1..42: note = Description: hH29-36
  source 1..42: mol_type = other RNA
taatttctactgttgtagatctcctgaggaaaattttggaga

SEQ ID NO: 5824 - RNA, 42 nt, synthetic construct
  misc_feature 1..42: note = Description of Artificial Sequence: Synthetic oligonucleotide
  misc_feature 1..42: note = Category: MG29-1 sgRNA targeting human HAO-1
  misc_feature 1..42: note = Description: hH29-37
  source 1..42: mol_type = other RNA
taatttctactgttgtagattcctgaggaaaattttggagac

SEQ ID NO: 5825 - RNA, 42 nt, synthetic construct
  misc_feature 1..42: note = Description of Artificial Sequence: Synthetic oligonucleotide
  misc_feature 1..42: note = Category: MG29-1 sgRNA targeting human HAO-1
  misc_feature 1..42: note = Description: hH29-38
  source 1..42: mol_type = other RNA
taatttctactgttgtagatgccacatatgcagcaagtccac

SEQ ID NO: 5826 - RNA, 42 nt, synthetic construct
  misc_feature 1..42: note = Description of Artificial Sequence: Synthetic oligonucleotide
  misc_feature 1..42: note = Category: MG29-1 sgRNA targeting human HAO-1
  misc_feature 1..42: note = Description: hH29-39
  source 1..42: mol_type = other RNA
taatttctactgttgtagatggagacgacagtggacttgctg

SEQ ID NO: 5827 - RNA, 42 nt, synthetic construct
  misc_feature 1..42: note = Description of Artificial Sequence: Synthetic oligonucleotide
  misc_feature 1..42: note = Category: MG29-1 sgRNA targeting human HAO-1
  misc_feature 1..42: note = Description: hH29-40
  source 1..42: mol_type = other RNA
taatttctactgttgtagatgagacgacagtggacttgctgc

SEQ ID NO: 5828 - RNA, 42 nt, synthetic construct
  misc_feature 1..42: note = Description of Artificial Sequence: Synthetic oligonucleotide
  misc_feature 1..42: note = Category: MG29-1 sgRNA targeting human HAO-1
  misc_feature 1..42: note = Description: hH29-41
  source 1..42: mol_type = other RNA
taatttctactgttgtagatatatcttcccagctgatagatg

SEQ ID NO: 5829 - RNA, 42 nt, synthetic construct
  misc_feature 1..42: note = Description of Artificial Sequence: Synthetic oligonucleotide
  misc_feature 1..42: note = Category: MG29-1 sgRNA targeting human HAO-1
  misc_feature 1..42: note = Description: hH29-42
  source 1..42: mol_type = other RNA
taatttctactgttgtagatcaacaattggcaatgatgtcag

SEQ ID NO: 5830 - DNA, 4087 bp, synthetic construct
  misc_feature 1..4087: note = Description of Artificial Sequence: Synthetic polynucleotide
  misc_feature 1..4087: note = Category: DNA sequence encoding the MG29-1 messenger RNA
  misc_feature 1..4087: note = Description: DNA sequence encoding the MG29-1 messenger RNA
  source 1..4087: mol_type = other DNA
aaaagccagctccagcaggcgctgctcactcctccccatcctctccctctgtccctctgtccctctgaccctgcactgtcccagcaccatggcccctaagaagaagagaaaagtcggcggaggcggcagcttcaacaacttcatcaagaagtacagcctgcagaaaaccctgcgcttcgagctgaagcctgtgggcgagacagccgactacatcgaggacttcaagagcgagtacctgaaggacaccgtgctgaaggacgagcagagagccaaggactaccaagagatcaagaccctgatcgacgattaccaccgcgagtacatcgaagagtgcctgagagaacccgtggacaagaaaaccggcgagatcctggacttcacccaggacctggaagatgccttcagctactaccagaagctgaaagagaaccccaccgagaacagagtcggctgggagaaagagcaagagagcctgaggaagaagctggtcacctccttcgtgggcaacgacggcctgttcaagaaagagttcatcaccagggacctgcctgagtggctgcagaagaaaggactctggggcgagtacaaggacacagtggaaaacttcaagaagttcaccacctacttcagcggcttccacgagaaccggaagaacatgtacaccgccgaggctcagagcaccgctatcgccaacagactgatgaacgacaacctgcctaagttctttaacaactacctggcctaccagaccatcaaagagaagcaccccgacctggtgttcagactggatgatgctctgctgcaggccgctggcgtggaacatctggatgaggctttccagcctagatacttcagcagactgttcgcccagagcggcatcaccgctttcaacgagctgatcggcggcagaaccacagagaacggcgagaagatccagggcctgaacgagcagatcaacctgtacagacagcagaaccccgagaaggccaagggcttccccagattcatgcctctgttcaagcagatcctgagcgacagagagacacacagctttctgcccgacgccttcgagaacgacaaagagctgctccaggctctgagagactacgtggacgccgccacatctgaggaaggcatgatcagccagctgaacaaggccatgaaccagttcgtgaccgccgacctgaagagagtgtacatcaagagcgccgctctgaccagcctgagccaagagctgttccacttcttcggcgtgatcagcgacgctatcgcttggtacgccgagaagagactgagccccaagaaggcccaagagtctttcctgaagcaagaggtgtacgccatcgaggaactgaaccaggctgtcgtgggctacatcgaccagctggaagatcagagcgagctgcagcaactgctggtggacctgccagatcctcagaaacccgtgtccagcttcatcctgacacactggcagaagtctcaagagcccctgcaggcagtgatcgccaaggtggaacctctgttcgaactggaagaactgagcaagaacaagagggccccaaagcacgacaaggaccaaggcggcgagggatttcagcaggtcgacgccatcaagaacatgctggacgccttcatggaagtgtcccacgctatcaagcccctgtacctggtcaagggaagaaaggccatcgacatgcccgacgtggacaccggcttctacgctgatttcgccgaggcctacagcgcctacgagcaagtgacagtgtccctgtacaacaagaccagaaaccacctgtccaagaagcccttcagcaaggacaagatcaagatcaacttcgacgcccctacactgctgaacggctgggacctgaacaaagagagcgacaacaagtccatcatcctgcggaaggacggcaacttctacctggcaatcatgcaccccaagcacaccaaggtgttcgactgctactctgcctctgaggctgccggcaagtgctacgagaagatgaactacaagctgctgagcggcgccaacaagatgctgcctaaggtgttctttagcaagaagggcatcgagacattcagccctccacaagaaatcctggacctgtacaagaacaacgagcataagaagggcgccaccttcaagctggaatcctgccacaagctgatcgatttcttcaagcggaacatccccaagtacaaggtgcaccctaccgacaactttggctgggacgtgttcggctttcacttcagccctaccagcagctacggcgacctgtctggcttctacagagaggtggaagcccagggatacaagctgtggttcagcgacgtgtccgaggcttacatcaacaaatgcgtggaagagggcaagctgttcctgttccaaatctacaacaaggacttctcccctaactccaccggcaagcccaacctgcacaccctgtattggaagggcctgttcgagcccgagaacctgaaagacgtggtgctgaagctgaatggcgaggccgagatcttctaccggaagcacagcatcaagcacgaggacaagaccatccacagagctaaggaccctatcgctaacaagaacgctgacaaccccaagaaacagagcgtgttcgattacgacatcatcaaggataagcggtatacccaggacaagttcttcttccacgtgccaatcagcctgaacttcaaaagccagggcgtcgtgcggttcaacgataagatcaacggcctgctggccgctcaggacgatgtgcatgtgatcggcatcgacagaggcgagagacatctgctgtactacaccgtggtcaacggcaagggcgaagtggtggaacagggcagcctgaatcaggtggccacagatcagggctacgtggtggattaccagcagaagctgcacgccaaagagaaagaacgcgaccaggccagaaagaactggtccaccatcgagaacatcaaagaactgaaggccggctacctgagccaggtggtgcataagctggctcagctgatcgtgaagcacaacgccatcgtgtgcctcgaggacctgaatttcggcttcaagaggggcagattcaaggtcgagaaacaggtgtaccagaagttcgagaaggctctgatcgacaagctgaactacctcgtgttcaaagagagaggcgccacacaggctggcggatacctgaatgcttaccagctggccgcacctttcgagagctttgagaagctgggcaagcagaccggcatcctgtactacgtgcggagcgactacaccagcaagatcgaccctgctaccggcttcgtggactttctgaagcctaagtacgagagcatggccaagagcaaagtgttcttcgagtccttcgagcgcatccagtggaaccaggccaaaggctacttcgagttcgagtttgactacaagaagatgtgccccagcagaaagttcggcgactacagaaccagatgggtcgtgtgcaccttcggcgacacccgctaccagaacagaagaaacaagagcagcggccagtgggagacagagacaatcgatgtgacagcccagctgaaagccctgttcgccgcttacggcatcacatacaatcaagaggataacatcaaggacgccattgccgccgtgaagtacaccaagttctacaagcagctgtactggctgctgagactgaccctgagcctgagacacagcgtgacaggcaccgacgaggatttcatcctgtctccagtggccgacgagaatggcgtgttctttgactctaggaaggccaccgacaagcagcctaaggacgctgatgctaacggcgcctaccatatcgccctgaaaggcctgtggaatctccagcagatcagacagcacgactggaacgtggaaaagcccaaaaagctgaacctcgccatgaagaacgaagagtggttcggcttcgctcagaagaagaagtttagagccagcggcggcaagaggcctgccgctacaaaaaaagccggccaggccaagaaaaagaagtgaccacacccccattcccccactccagatagaacttcagttatatctcacgtgtctggagtt

SEQ ID NO: 5831 - RNA, 46 nt, synthetic construct; identical to SEQ ID NO: 5779
  misc_feature 1..46: note = Description of Artificial Sequence: Synthetic oligonucleotide
  misc_feature 1..46: note = Category: MG29-1 sgRNA targeting human HAO-1
  misc_feature 1..46: note = Description: hH29-4_37
  source 1..46: mol_type = other RNA

SEQ ID NO: 5832 - RNA, 46 nt, synthetic construct
  misc_feature 1..46: note = Description of Artificial Sequence: Synthetic oligonucleotide
  misc_feature 1..46: note = Category: MG29-1 sgRNA targeting human HAO-1
  misc_feature 1..46: note = Description: hH29-21-37
  source 1..46: mol_type = other RNA
cttttaatttctactgttgtagatggacagagggtcagcatgccaa

SEQ ID NO: 5833 - RNA, 46 nt, synthetic construct
  misc_feature 1..46: note = Description of Artificial Sequence: Synthetic oligonucleotide
  misc_feature 1..46: note = Category: MG29-1 sgRNA targeting human HAO-1
  misc_feature 1..46: note = Description: hH29-23-37
  source 1..46: mol_type = other RNA
cttttaatttctactgttgtagattcagcctgtcagtccctgggaa

SEQ ID NO: 5834 - RNA, 46 nt, synthetic construct
  misc_feature 1..46: note = Description of Artificial Sequence: Synthetic oligonucleotide
  misc_feature 1..46: note = Category: MG29-1 sgRNA targeting human HAO-1
  misc_feature 1..46: note = Description: hH29-41-37
  source 1..46: mol_type = other RNA
cttttaatttctactgttgtagatatatcttcccagctgatagatg

SEQ ID NO: 5835 - RNA, 46 nt, synthetic construct; identical to SEQ ID NO: 5695
  misc_feature 1..46: note = Description of Artificial Sequence: Synthetic oligonucleotide
  misc_feature 1..46: note = Category: Guide modification chemistry
  misc_feature 1..46: note = Description: Chemistry 37 (22 nt spacer)
  misc_difference 25..46: note = modified_base - a, c, u, g, unknown or other
  source 1..46: mol_type = other RNA

SEQ ID NO: 5836 - RNA, 46 nt, synthetic construct; identical to SEQ ID NO: 5781
  misc_feature 1..46: note = Description of Artificial Sequence: Synthetic oligonucleotide
  misc_feature 1..46: note = Category: MG29-1 sgRNA targeting mouse HAO-1
  misc_feature 1..46: note = Description: mH29-29-37
  source 1..46: mol_type = other RNA

SEQ ID NO: 5837 - RNA, 46 nt, synthetic construct; identical to SEQ ID NO: 5781
  misc_feature 1..46: note = Description of Artificial Sequence: Synthetic oligonucleotide
  misc_feature 1..46: note = Category: MG29-1 sgRNA targeting mouse HAO-1
  misc_feature 1..46: note = Description: mH29-29-44
  source 1..46: mol_type = other RNA

SEQ ID NO: 5838 - RNA, 44 nt, synthetic construct; identical to SEQ ID NO: 5710
  misc_feature 1..44: note = Description of Artificial Sequence: Synthetic oligonucleotide
  misc_feature 1..44: note = Category: MG29-1 sgRNA targeting mouse HAO-1
  misc_feature 1..44: note = Description: mH29-29s-37
  source 1..44: mol_type = other RNA

SEQ ID NO: 5839 - RNA, 44 nt, synthetic construct; identical to SEQ ID NO: 5710
  misc_feature 1..44: note = Description of Artificial Sequence: Synthetic oligonucleotide
  misc_feature 1..44: note = Category: MG29-1 sgRNA targeting mouse HAO-1
  misc_feature 1..44: note = Description: mH29-29s-44
  source 1..44: mol_type = other RNA

SEQ ID NO: 5840 - RNA, 70 nt, synthetic construct; identical to SEQ ID NO: 5704
  misc_feature 1..70: note = Description of Artificial Sequence: Synthetic oligonucleotide
  misc_feature 1..70: note = Category: MG29-1 sgRNA targeting mouse HAO-1
  misc_feature 1..70: note = Description: mH29-29-50
  source 1..70: mol_type = other RNA

SEQ ID NO: 5841 - RNA, 68 nt, synthetic construct; identical to SEQ ID NO: 5705
  misc_feature 1..68: note = Description of Artificial Sequence: Synthetic oligonucleotide
  misc_feature 1..68: note = Category: MG29-1 sgRNA targeting mouse HAO-1
  misc_feature 1..68: note = Description: mH29-29-50b
  source 1..68: mol_type = other RNA

SEQ ID NO: 5842 - RNA, 68 nt, synthetic construct; identical to SEQ ID NO: 5705
  misc_feature 1..68: note = Description of Artificial Sequence: Synthetic oligonucleotide
  misc_feature 1..68: note = Category: MG29-1 sgRNA targeting mouse HAO-1
  misc_feature 1..68: note = Description: mH29-29-51b
  source 1..68: mol_type = other RNA

SEQ ID NO: 5843 - RNA, 68 nt, synthetic construct; identical to SEQ ID NO: 5705
  misc_feature 1..68: note = Description of Artificial Sequence: Synthetic oligonucleotide
  misc_feature 1..68: note = Category: MG29-1 sgRNA targeting mouse HAO-1
  misc_feature 1..68: note = Description: mH29-29-52b
  source 1..68: mol_type = other RNA

SEQ ID NO: 5844 - RNA, 68 nt, synthetic construct; identical to SEQ ID NO: 5705
  misc_feature 1..68: note = Description of Artificial Sequence: Synthetic oligonucleotide
  misc_feature 1..68: note = Category: MG29-1 sgRNA targeting mouse HAO-1
  misc_feature 1..68: note = Description: mH29-29-53b
  source 1..68: mol_type = other RNA

SEQ ID NO: 5845 - RNA, 68 nt, synthetic construct; identical to SEQ ID NO: 5705
  misc_feature 1..68: note = Description of Artificial Sequence: Synthetic oligonucleotide
  misc_feature 1..68: note = Category: MG29-1 sgRNA targeting mouse HAO-1
  misc_feature 1..68: note = Description: mH29-29-54b
  source 1..68: mol_type = other RNA

SEQ ID NO: 5846 - DNA, 4087 bp, synthetic construct; identical to SEQ ID NO: 5830
  misc_feature 1..4087: note = Description of Artificial Sequence: Synthetic polynucleotide
  misc_feature 1..4087: note = Category: DNA sequence encoding the MG29-1 messenger RNA
  misc_feature 1..4087: note = Description: DNA sequence encoding the MG29-1 messenger RNA
  source 1..4087: mol_type = other DNA

SEQ ID NO: 5847 - RNA, 42 nt, synthetic construct
  misc_feature 1..42: note = Description of Artificial Sequence: Synthetic oligonucleotide
  misc_feature 1..42: note = Category: MG29-1 sgRNA targeting mouse APO-A1
  misc_feature 1..42: note = Description: MG29-1-mouse APO-A1-sgRNA-A1
  source 1..42: mol_type = other RNA
taatttctactgttgtagatgctaatgtgtatgtggatgcgg

SEQ ID NO: 5848 - RNA, 42 nt, synthetic construct
  misc_feature 1..42: note = Description of Artificial Sequence: Synthetic oligonucleotide
  misc_feature 1..42: note = Category: MG29-1 sgRNA targeting mouse APO-A1
  misc_feature 1..42: note = Description: MG29-1-mouse APO-A1-sgRNA-B1
  source 1..42: mol_type = other RNA
taatttctactgttgtagataatcctcctccttgggccaaca

SEQ ID NO: 5849 - RNA, 42 nt, synthetic construct
  misc_feature 1..42: note = Description of Artificial Sequence: Synthetic oligonucleotide
  misc_feature 1..42: note = Category: MG29-1 sgRNA targeting mouse APO-A1
  misc_feature 1..42: note = Description: MG29-1-mouse APO-A1-sgRNA-C1
  source 1..42: mol_type = other RNA
taatttctactgttgtagatcttacttcagctgttggcccaa

SEQ ID NO: 5850 - RNA, 42 nt, synthetic construct
  misc_feature 1..42: note = Description of Artificial Sequence: Synthetic oligonucleotide
  misc_feature 1..42: note = Category: MG29-1 sgRNA targeting mouse APO-A1
  misc_feature 1..42: note = Description: MG29-1-mouse APO-A1-sgRNA-D1
  source 1..42: mol_type = other RNA
taatttctactgttgtagataccgcatccacatacacattag

SEQ ID NO: 5851 - RNA, 42 nt, synthetic construct
  misc_feature 1..42: note = Description of Artificial Sequence: Synthetic oligonucleotide
  misc_feature 1..42: note = Category: MG29-1 sgRNA targeting mouse APO-A1
  misc_feature 1..42: note = Description: MG29-1-mouse APO-A1-sgRNA-E1
  source 1..42: mol_type = other RNA
taatttctactgttgtagattcccattgggactggggttcat

SEQ ID NO: 5852 - RNA, 42 nt, synthetic construct
  misc_feature 1..42: note = Description of Artificial Sequence: Synthetic oligonucleotide
  misc_feature 1..42: note = Category: MG29-1 sgRNA targeting mouse APO-A1
  misc_feature 1..42: note = Description: MG29-1-mouse APO-A1-sgRNA-F1
  source 1..42: mol_type = other RNA
taatttctactgttgtagatgcgaccgcatgcgcacacacgt

SEQ ID NO: 5853 - RNA, 42 nt, synthetic construct
  misc_feature 1..42: note = Description of Artificial Sequence: Synthetic oligonucleotide
  misc_feature 1..42: note = Category: MG29-1 sgRNA targeting mouse APO-A1
  misc_feature 1..42: note = Description: MG29-1-mouse APO-A1-sgRNA-G1
  source 1..42: mol_type = other RNA
taatttctactgttgtagattcgccaagtgtcttcaggtggg

SEQ ID NO: 5854 - RNA, 42 nt, synthetic construct
  misc_feature 1..42: note = Description of Artificial Sequence: Synthetic oligonucleotide
  misc_feature 1..42: note = Category: MG29-1 sgRNA targeting mouse APO-A1
  misc_feature 1..42: note = Description: MG29-1-mouse APO-A1-sgRNA-H1
  source 1..42: mol_type = other RNA
taatttctactgttgtagatggccctggtgtggtactcgttc

SEQ ID NO: 5855 - RNA, 42 nt, synthetic construct
  misc_feature 1..42: note = Description of Artificial Sequence: Synthetic oligonucleotide
  misc_feature 1..42: note = Category: MG29-1 sgRNA targeting mouse APO-A1
  misc_feature 1..42: note = Description: MG29-1-mouse APO-A1-sgRNA-A2
  source 1..42: mol_type = other RNA
taatttctactgttgtagatgccctggtgtggtactcgttca

SEQ ID NO: 5856 - RNA, 42 nt, synthetic construct
  misc_feature 1..42: note = Description of Artificial Sequence: Synthetic oligonucleotide
  misc_feature 1..42: note = Category: MG29-1 sgRNA targeting mouse APO-A1
  misc_feature 1..42: note = Description: MG29-1-mouse APO-A1-sgRNA-B2
  source 1..42: mol_type = other RNA
taatttctactgttgtagatcatttcttctggaattcgtcca

SEQ ID NO: 5857 - RNA, 42 nt, synthetic construct
  misc_feature 1..42: note = Description of Artificial Sequence: Synthetic oligonucleotide
  misc_feature 1..42: note = Category: MG29-1 sgRNA targeting mouse APO-A1
  misc_feature 1..42: note = Description: MG29-1-mouse APO-A1-sgRNA-C2
  source 1..42: mol_type = other RNA
taatttctactgttgtagatttctggaattcgtccaggtagg

SEQ ID NO: 5858 - RNA, 42 nt, synthetic construct
  misc_feature 1..42: note = Description of Artificial Sequence: Synthetic oligonucleotide
  misc_feature 1..42: note = Category: MG29-1 sgRNA targeting mouse APO-A1
  misc_feature 1..42: note = Description: MG29-1-mouse APO-A1-sgRNA-D2
  source 1..42: mol_type = other RNA
taatttctactgttgtagatacttcctctaggtccttgttca

SEQ ID NO: 5859 - RNA, 42 nt, synthetic construct
  misc_feature 1..42: note = Description of Artificial Sequence: Synthetic oligonucleotide
  misc_feature 1..42: note = Category: MG29-1 sgRNA targeting mouse APO-A1
  misc_feature 1..42: note = Description: MG29-1-mouse APO-A1-sgRNA-E2
  source 1..42: mol_type = other RNA
taatttctactgttgtagattttctccaggttatcccagaag

SEQ ID NO: 5860 - RNA, 42 nt, synthetic construct
  misc_feature 1..42: note = Description of Artificial Sequence: Synthetic oligonucleotide
  misc_feature 1..42: note = Category: MG29-1 sgRNA targeting mouse APO-A1
  misc_feature 1..42: note = Description: MG29-1-mouse APO-A1-sgRNA-F2
  source 1..42: mol_type = other RNA
taatttctactgttgtagattccaggttatcccagaagtccc

SEQ ID NO: 5861 - DNA, 22 bp, unidentified
  misc_feature 1..22: note = Description of Unknown: MG29-1-mouse APO-A1-target site-A1 sequence
  misc_feature 1..22: note = Category: DNA Sequence of APO-A1 Target Site
  source 1..22: mol_type = unassigned DNA
gctaatgtgtatgtggatgcgg

SEQ ID NO: 5862 - DNA, 22 bp, unidentified
  misc_feature 1..22: note = Description of Unknown: MG29-1-mouse APO-A1-target site-B1 sequence
  misc_feature 1..22: note = Category: DNA Sequence of APO-A1 Target Site
  source 1..22: mol_type = unassigned DNA
aatcctcctccttgggccaaca

SEQ ID NO: 5863 - DNA, 22 bp, unidentified
  misc_feature 1..22: note = Description of Unknown: MG29-1-mouse APO-A1-target site-C1 sequence
  misc_feature 1..22: note = Category: DNA Sequence of APO-A1 Target Site
  source 1..22: mol_type = unassigned DNA
cttacttcagctgttggcccaa

SEQ ID NO: 5864 - DNA, 22 bp, unidentified
  misc_feature 1..22: note = Description of Unknown: MG29-1-mouse APO-A1-target site-D1 sequence
  misc_feature 1..22: note = Category: DNA Sequence of APO-A1 Target Site
  source 1..22: mol_type = unassigned DNA
accgcatccacatacacattag

SEQ ID NO: 5865 - DNA, 22 bp, unidentified
  misc_feature 1..22: note = Description of Unknown: MG29-1-mouse APO-A1-target site-E1 sequence
  misc_feature 1..22: note = Category: DNA Sequence of APO-A1 Target Site
  source 1..22: mol_type = unassigned DNA
tcccattgggactggggttcat

SEQ ID NO: 5866 - DNA, 22 bp, unidentified
  misc_feature 1..22: note = Description of Unknown: MG29-1-mouse APO-A1-target site-F1 sequence
  misc_feature 1..22: note = Category: DNA Sequence of APO-A1 Target Site
  source 1..22: mol_type = unassigned DNA
gcgaccgcatgcgcacacacgt

SEQ ID NO: 5867 - DNA, 22 bp, unidentified
  misc_feature 1..22: note = Description of Unknown: MG29-1-mouse APO-A1-target site-G1 sequence
  misc_feature 1..22: note = Category: DNA Sequence of APO-A1 Target Site
  source 1..22: mol_type = unassigned DNA
tcgccaagtgtcttcaggtggg

SEQ ID NO: 5868 - DNA, 22 bp, unidentified
  misc_feature 1..22: note = Description of Unknown: MG29-1-mouse APO-A1-target site-H1 sequence
  misc_feature 1..22: note = Category: DNA Sequence of APO-A1 Target Site
  source 1..22: mol_type = unassigned DNA
ggccctggtgtggtactcgttc

SEQ ID NO: 5869 - DNA, 22 bp, unidentified
  misc_feature 1..22: note = Description of Unknown: MG29-1-mouse APO-A1-target site-A2 sequence
  misc_feature 1..22: note = Category: DNA Sequence of APO-A1 Target Site
  source 1..22: mol_type = unassigned DNA
gccctggtgtggtactcgttca

SEQ ID NO: 5870 - DNA, 22 bp, unidentified
  misc_feature 1..22: note = Description of Unknown: MG29-1-mouse APO-A1-target site-B2 sequence
  misc_feature 1..22: note = Category: DNA Sequence of APO-A1 Target Site
  source 1..22: mol_type = unassigned DNA
catttcttctggaattcgtcca

SEQ ID NO: 5871 - DNA, 22 bp, unidentified
  misc_feature 1..22: note = Description of Unknown: MG29-1-mouse APO-A1-target site-C2 sequence
  misc_feature 1..22: note = Category: DNA Sequence of APO-A1 Target Site
  source 1..22: mol_type = unassigned DNA
ttctggaattcgtccaggtagg

SEQ ID NO: 5872 - DNA, 22 bp, unidentified
  misc_feature 1..22: note = Description of Unknown: MG29-1-mouse APO-A1-target site-D2 sequence
  misc_feature 1..22: note = Category: DNA Sequence of APO-A1 Target Site
  source 1..22: mol_type = unassigned DNA
acttcctctaggtccttgttca

SEQ ID NO: 5873 - DNA, 22 bp, unidentified
  misc_feature 1..22: note = Description of Unknown: MG29-1-mouse APO-A1-target site-E2 sequence
  misc_feature 1..22: note = Category: DNA Sequence of APO-A1 Target Site
  source 1..22: mol_type = unassigned DNA
tttctccaggttatcccagaag

SEQ ID NO: 5874 - DNA, 22 bp, unidentified
  misc_feature 1..22: note = Description of Unknown: MG29-1-mouse APO-A1-target site-F2 sequence
  misc_feature 1..22: note = Category: DNA Sequence of APO-A1 Target Site
  source 1..22: mol_type = unassigned DNA
tccaggttatcccagaagtccc

SEQ ID NO: 5875 - RNA, 42 nt, synthetic construct
  misc_feature 1..42: note = Description of Artificial Sequence: Synthetic oligonucleotide
  misc_feature 1..42: note = Category: MG29-1 sgRNA targeting mouse ANGPTL3
  misc_feature 1..42: note = Description: MG29-1-mouse ANGPTL3-sgRNA-A1
  source 1..42: mol_type = other RNA
taatttctactgttgtagattgttgttcctttagtaattgca

SEQ ID NO: 5876 - RNA, 42 nt, synthetic construct
  misc_feature 1..42: note = Description of Artificial Sequence: Synthetic oligonucleotide
  misc_feature 1..42: note = Category: MG29-1 sgRNA targeting mouse ANGPTL3
  misc_feature 1..42: note = Description: MG29-1-mouse ANGPTL3-sgRNA-B1
  source 1..42: mol_type = other RNA
taatttctactgttgtagatgttgttcctttagtaattgcat

SEQ ID NO: 5877 - RNA, 42 nt, synthetic construct
  misc_feature 1..42: note = Description of Artificial Sequence: Synthetic oligonucleotide
  misc_feature 1..42: note = Category: MG29-1 sgRNA targeting mouse ANGPTL3
  misc_feature 1..42: note = Description: MG29-1-mouse ANGPTL3-sgRNA-C1
  source 1..42: mol_type = other RNA
taatttctactgttgtagatttgttcctttagtaattgcatc

SEQ ID NO: 5878 - RNA, 42 nt, synthetic construct
  misc_feature 1..42: note = Description of Artificial Sequence: Synthetic oligonucleotide
  misc_feature 1..42: note = Category: MG29-1 sgRNA targeting mouse ANGPTL3
  misc_feature 1..42: note = Description: MG29-1-mouse ANGPTL3-sgRNA-D1
  source 1..42: mol_type = other RNA
taatttctactgttgtagatgtaattgcatccagagtggatc

SEQ ID NO: 5879 - RNA, 42 nt, synthetic construct
  misc_feature 1..42: note = Description of Artificial Sequence: Synthetic oligonucleotide
  misc_feature 1..42: note = Category: MG29-1 sgRNA targeting mouse ANGPTL3
  misc_feature 1..42: note = Description: MG29-1-mouse ANGPTL3-sgRNA-E1
  source 1..42: mol_type = other RNA
taatttctactgttgtagatatcatttgattctgcaccttca

SEQ ID NO: 5880 - RNA, 42 nt, synthetic construct
  misc_feature 1..42: note = Description of Artificial Sequence: Synthetic oligonucleotide
  misc_feature 1..42: note = Category: MG29-1 sgRNA targeting mouse ANGPTL3
  misc_feature 1..42: note = Description: MG29-1-mouse ANGPTL3-sgRNA-F1
  source 1..42: mol_type = other RNA
taatttctactgttgtagatattctgcaccttcagagccaaa

SEQ ID NO: 5881 - RNA, 42 nt, synthetic construct
  misc_feature 1..42: note = Description of Artificial Sequence: Synthetic oligonucleotide
  misc_feature 1..42: note = Category: MG29-1 sgRNA targeting mouse ANGPTL3
  misc_feature 1..42: note = Description: MG29-1-mouse ANGPTL3-sgRNA-G1
  source 1..42: mol_type = other RNA
taatttctactgttgtagatctatgttggatgatgtcaaaat

SEQ ID NO: 5882 - RNA, 42 nt, synthetic construct
  misc_feature 1..42: note = Description of Artificial Sequence: Synthetic oligonucleotide
  misc_feature 1..42: note = Category: MG29-1 sgRNA targeting mouse ANGPTL3
  misc_feature 1..42: note = Description: MG29-1-mouse ANGPTL3-sgRNA-H1
  source 1..42: mol_type = other RNA
taatttctactgttgtagatagcgaatggcctcctgcagctg

SEQ ID NO: 5883 - RNA, 42 nt, synthetic construct
  misc_feature 1..42: note = Description of Artificial Sequence: Synthetic oligonucleotide
  misc_feature 1..42: note = Category: MG29-1 sgRNA targeting mouse ANGPTL3
  misc_feature 1..42: note = Description: MG29-1-mouse ANGPTL3-sgRNA-A2
  source 1..42: mol_type = other RNA
taatttctactgttgtagatgcgaatggcctcctgcagctgg

SEQ ID NO: 5884 - RNA, 42 nt, synthetic construct
  misc_feature 1..42: note = Description of Artificial Sequence: Synthetic oligonucleotide
  misc_feature 1..42: note = Category: MG29-1 sgRNA targeting mouse ANGPTL3
  misc_feature 1..42: note = Description: MG29-1-mouse ANGPTL3-sgRNA-B2
  source 1..42: mol_type = other RNA
taatttctactgttgtagatgtccataagactaagggacaaa

SEQ ID NO: 5885 - RNA, 42 nt, synthetic construct
  misc_feature 1..42: note = Description of Artificial Sequence: Synthetic oligonucleotide
  misc_feature 1..42: note = Category: MG29-1 sgRNA targeting mouse ANGPTL3
  misc_feature 1..42: note = Description: MG29-1-mouse ANGPTL3-sgRNA-C2
  source 1..42: mol_type = other RNA
taatttctactgttgtagattccataagactaagggacaaat

SEQ ID NO: 5886 - RNA, 42 nt, synthetic construct
  misc_feature 1..42: note = Description of Artificial Sequence: Synthetic oligonucleotide
  misc_feature 1..42: note = Category: MG29-1 sgRNA targeting mouse ANGPTL3
  misc_feature 1..42: note = Description: MG29-1-mouse ANGPTL3-sgRNA-D2
  source 1..42: mol_type = other RNA
taatttctactgttgtagatagaagctcaacatatttgatca

SEQ ID NO: 5887 - RNA, 42 nt, synthetic construct
  misc_feature 1..42: note = Description of Artificial Sequence: Synthetic oligonucleotide
  misc_feature 1..42: note = Category: MG29-1 sgRNA targeting mouse ANGPTL3
  misc_feature 1..42: note = Description: MG29-1-mouse ANGPTL3-sgRNA-E2
  source 1..42: mol_type = other RNA
taatttctactgttgtagatatcagtctttttatgacctatc

SEQ ID NO: 5888 - RNA, 42 nt, synthetic construct
  misc_feature 1..42: note = Description of Artificial Sequence: Synthetic oligonucleotide
  misc_feature 1..42: note = Category: MG29-1 sgRNA targeting mouse ANGPTL3
  misc_feature 1..42: note = Description: MG29-1-mouse ANGPTL3-sgRNA-F2
  source 1..42: mol_type = other RNA
taatttctactgttgtagattatgacctatcacttcgaacca

SEQ ID NO: 5889 - RNA, 42 nt, synthetic construct
  misc_feature 1..42: note = Description of Artificial Sequence: Synthetic oligonucleotide
  misc_feature 1..42: note = Category: MG29-1 sgRNA targeting mouse ANGPTL3
  misc_feature 1..42: note = Description: MG29-1-mouse ANGPTL3-sgRNA-G2
  source 1..42: mol_type = other RNA
taatttctactgttgtagatatgacctatcacttcgaaccaa

SEQ ID NO: 5890 - RNA, 42 nt, synthetic construct
  misc_feature 1..42: note = Description of Artificial Sequence: Synthetic oligonucleotide
  misc_feature 1..42: note = Category: MG29-1 sgRNA targeting mouse ANGPTL3
  misc_feature 1..42: note = Description: MG29-1-mouse ANGPTL3-sgRNA-H2
  source 1..42: mol_type = other RNA
taatttctactgttgtagattgacctatcacttcgaaccaat

SEQ ID NO: 5891 - RNA, 42 nt, synthetic construct
  misc_feature 1..42: note = Description of Artificial Sequence: Synthetic oligonucleotide
  misc_feature 1..42: note = Category: MG29-1 sgRNA targeting mouse ANGPTL3
  misc_feature 1..42: note = Description: MG29-1-mouse ANGPTL3-sgRNA-A3
  source 1..42: mol_type = other RNA
taatttctactgttgtagatgaggagcagctaaccaacttaa

SEQ ID NO: 5892 - RNA, 42 nt, synthetic construct
  misc_feature 1..42: note = Description of Artificial Sequence: Synthetic oligonucleotide
  misc_feature 1..42: note = Category: MG29-1 sgRNA targeting mouse ANGPTL3
  misc_feature 1..42: note = Description: MG29-1-mouse ANGPTL3-sgRNA-B3
  source 1..42: mol_type = other RNA
taatttctactgttgtagattacttactttgagtgatgttac

SEQ ID NO: 5893 - RNA, 42 nt, synthetic construct
  misc_feature 1..42: note = Description of Artificial Sequence: Synthetic oligonucleotide
  misc_feature 1..42: note = Category: MG29-1 sgRNA targeting mouse ANGPTL3
  misc_feature 1..42: note = Description: MG29-1-mouse ANGPTL3-sgRNA-C3
  source 1..42: mol_type = other RNA
taatttctactgttgtagatagtgatgttacttctgggtgct

SEQ ID NO: 5894 - RNA, 42 nt, synthetic construct
  misc_feature 1..42: note = Description of Artificial Sequence: Synthetic oligonucleotide
  misc_feature 1..42: note = Category: MG29-1 sgRNA targeting mouse ANGPTL3
  misc_feature 1..42: note = Description: MG29-1-mouse ANGPTL3-sgRNA-D3
  source 1..42: mol_type = other RNA
taatttctactgttgtagatagttcagttctactgacatgtt

SEQ ID NO: 5895 - RNA, 42 nt, synthetic construct
  misc_feature 1..42: note = Description of Artificial Sequence: Synthetic oligonucleotide
  misc_feature 1..42: note = Category: MG29-1 sgRNA targeting mouse ANGPTL3
  misc_feature 1..42: note = Description: MG29-1-mouse ANGPTL3-sgRNA-E3
  source 1..42: mol_type = other RNA
taatttctactgttgtagattaacttgtagtgtagatgtagt

SEQ ID NO: 5896 - RNA, 42 nt, synthetic construct
  misc_feature 1..42: note = Description of Artificial Sequence: Synthetic oligonucleotide
  misc_feature 1..42: note = Category: MG29-1 sgRNA targeting mouse ANGPTL3
  misc_feature 1..42: note = Description: MG29-1-mouse ANGPTL3-sgRNA-F3
  source 1..42: mol_type = other RNA
taatttctactgttgtagataacttgtagtgtagatgtagtt

SEQ ID NO: 5897 - RNA, 42 nt, synthetic construct
  misc_feature 1..42: note = Description of Artificial Sequence: Synthetic oligonucleotide
  misc_feature 1..42: note = Category: MG29-1 sgRNA targeting mouse ANGPTL3
  misc_feature 1..42: note = Description: MG29-1-mouse ANGPTL3-sgRNA-G3
  source 1..42: mol_type = other RNA
taatttctactgttgtagatacttgtagtgtagatgtagttc

SEQ ID NO: 5898 - RNA, 42 nt, synthetic construct
  misc_feature 1..42: note = Description of Artificial Sequence: Synthetic oligonucleotide
  misc_feature 1..42: note = Category: MG29-1 sgRNA targeting mouse ANGPTL3
  misc_feature 1..42: note = Description: MG29-1-mouse ANGPTL3-sgRNA-H3
  source 1..42: mol_type = other RNA
taatttctactgttgtagatcctcttctttgatttcattggt

SEQ ID NO: 5899 - RNA, 42 nt, synthetic construct
  misc_feature 1..42: note = Description of Artificial Sequence: Synthetic oligonucleotide
  misc_feature 1..42: note = Category: MG29-1 sgRNA targeting mouse ANGPTL3
  misc_feature 1..42: note = Description: MG29-1-mouse ANGPTL3-sgRNA-A4
  source 1..42: mol_type = other RNA
taatttctactgttgtagatctcttctttgatttcattggtt

SEQ ID NO: 5900 - RNA, 42 nt, synthetic construct
  misc_feature 1..42: note = Description of Artificial Sequence: Synthetic oligonucleotide
  misc_feature 1..42: note = Category: MG29-1 sgRNA targeting mouse ANGPTL3
  misc_feature 1..42: note = Description: MG29-1-mouse ANGPTL3-sgRNA-B4
  source 1..42: mol_type = other RNA
taatttctactgttgtagatatttcattggttcgaagtgata

SEQ ID NO: 5901 - RNA, 42 nt, synthetic construct
  misc_feature 1..42: note = Description of Artificial Sequence: Synthetic oligonucleotide
  misc_feature 1..42: note = Category: MG29-1 sgRNA targeting mouse ANGPTL3
  misc_feature 1..42: note = Description: MG29-1-mouse ANGPTL3-sgRNA-C4
  source 1..42: mol_type = other RNA
taatttctactgttgtagatattggttcgaagtgataggtca

SEQ ID NO: 5902 - RNA, 42 nt, synthetic construct
  misc_feature 1..42: note = Description of Artificial Sequence: Synthetic oligonucleotide
  misc_feature 1..42: note = Category: MG29-1 sgRNA targeting mouse ANGPTL3
  misc_feature 1..42: note = Description: MG29-1-mouse ANGPTL3-sgRNA-D4
  source 1..42: mol_type = other RNA
taatttctactgttgtagattcccttagtcttatggacaaaa

SEQ ID NO: 5903 - RNA, 42 nt, synthetic construct
  misc_feature 1..42: note = Description of Artificial Sequence: Synthetic oligonucleotide
  misc_feature 1..42: note = Category: MG29-1 sgRNA targeting mouse ANGPTL3
  misc_feature 1..42: note = Description: MG29-1-mouse ANGPTL3-sgRNA-E4
  source 1..42: mol_type = other RNA
taatttctactgttgtagatagtccatgacccagctgcagga

SEQ ID NO: 5904 - RNA, 42 nt, synthetic construct
  misc_feature 1..42: note = Description of Artificial Sequence: Synthetic oligonucleotide
  misc_feature 1..42: note = Category: MG29-1 sgRNA targeting mouse ANGPTL3
  misc_feature 1..42: note = Description: MG29-1-mouse ANGPTL3-sgRNA-F4
  source 1..42: mol_type = other RNA
taatttctactgttgtagatgacatcatccaacatagcaaat

SEQ ID NO: 5905 - RNA, 42 nt, synthetic construct
  misc_feature 1..42: note = Description of Artificial Sequence: Synthetic oligonucleotide
  misc_feature 1..42: note = Category: MG29-1 sgRNA targeting mouse ANGPTL3
  misc_feature 1..42: note = Description: MG29-1-mouse ANGPTL3-sgRNA-G4
  source 1..42: mol_type = other RNA
taatttctactgttgtagatacatcatccaacatagcaaatc

SEQ ID NO: 5906 - RNA, 42 nt, synthetic construct
  misc_feature 1..42: note = Description of Artificial Sequence: Synthetic oligonucleotide
  misc_feature 1..42: note = Category: MG29-1 sgRNA targeting mouse ANGPTL3
  misc_feature 1..42: note = Description: MG29-1-mouse ANGPTL3-sgRNA-H4
  source 1..42: mol_type = other RNA
taatttctactgttgtagatggctctgaaggtgcagaatcaa

SEQ ID NO: 5907 - RNA, 42 nt, synthetic construct
  misc_feature 1..42: note = Description of Artificial Sequence: Synthetic oligonucleotide
  misc_feature 1..42: note = Category: MG29-1 sgRNA targeting mouse ANGPTL3
  misc_feature 1..42: note = Description: MG29-1-mouse ANGPTL3-sgRNA-A5
  source 1..42: mol_type = other RNA
taatttctactgttgtagatgctctgaaggtgcagaatcaaa

SEQ ID NO: 5908 - RNA, 42 nt, synthetic construct
  misc_feature 1..42: note = Description of Artificial Sequence: Synthetic oligonucleotide
  misc_feature 1..42: note = Category: MG29-1 sgRNA targeting mouse ANGPTL3
  misc_feature 1..42: note = Description: MG29-1-mouse ANGPTL3-sgRNA-B5
  source 1..42: mol_type = other RNA
taatttctactgttgtagatgtagaacagcaagacaacagca

SEQ ID NO: 5909 - RNA, 42 nt, synthetic construct
  misc_feature 1..42: note = Description of Artificial Sequence: Synthetic oligonucleotide
  misc_feature 1..42: note = Category: MG29-1 sgRNA targeting mouse ANGPTL3
  misc_feature 1..42: note = Description: MG29-1-mouse ANGPTL3-sgRNA-C5
  source 1..42: mol_type = other RNA
taatttctactgttgtagattagaacagcaagacaacagcat

SEQ ID NO: 5910 - RNA, 42 nt, synthetic construct
  misc_feature 1..42: note = Description of Artificial Sequence: Synthetic oligonucleotide
  misc_feature 1..42: note = Category: MG29-1 sgRNA targeting mouse ANGPTL3
  misc_feature 1..42: note = Description: MG29-1-mouse ANGPTL3-sgRNA-D5
  source 1..42: mol_type = other RNA
taatttctactgttgtagatctatttcttttatctgcatgtg

SEQ ID NO: 5911 - RNA, 42 nt, synthetic construct
  misc_feature 1..42: note = Description of Artificial Sequence: Synthetic oligonucleotide
  misc_feature 1..42: note = Category: MG29-1 sgRNA targeting mouse ANGPTL3
  misc_feature 1..42: note = Description: MG29-1-mouse ANGPTL3-sgRNA-E5
  source 1..42: mol_type = other RNA
taatttctactgttgtagattatttcttttatctgcatgtgc

SEQ ID NO: 5912 - RNA, 42 nt, synthetic construct
  misc_feature 1..42: note = Description of Artificial Sequence: Synthetic oligonucleotide
  misc_feature 1..42: note = Category: MG29-1 sgRNA targeting mouse ANGPTL3
  misc_feature 1..42: note = Description: MG29-1-mouse ANGPTL3-sgRNA-F5
  source 1..42: mol_type = other RNA
taatttctactgttgtagatttttatctgcatgtgctgttga

SEQ ID NO: 5913 - RNA, 42 nt, synthetic construct
  misc_feature 1..42: note = Description of Artificial Sequence: Synthetic oligonucleotide
  misc_feature 1..42: note = Category: MG29-1 sgRNA targeting mouse ANGPTL3
  misc_feature 1..42: note = Description: MG29-1-mouse ANGPTL3-sgRNA-G5
  source 1..42: mol_type = other RNA
taatttctactgttgtagatatctgcatgtgctgttgactta

SEQ ID NO: 5914 - RNA, 42 nt, synthetic construct
  misc_feature 1..42: note = Description of Artificial Sequence: Synthetic oligonucleotide
  misc_feature 1..42: note = Category: MG29-1 sgRNA targeting mouse ANGPTL3
  misc_feature 1..42: note = Description: MG29-1-mouse ANGPTL3-sgRNA-H5
  source 1..42: mol_type = other RNA
taatttctactgttgtagattctgcatgtgctgttgacttaa

SEQ ID NO: 5915 - RNA, 42 nt, synthetic construct
  misc_feature 1..42: note = Description of Artificial Sequence: Synthetic oligonucleotide
  misc_feature 1..42: note = Category: MG29-1 sgRNA targeting mouse ANGPTL3
  misc_feature 1..42: note = Description: MG29-1-mouse ANGPTL3-sgRNA-A6
  source 1..42: mol_type = other RNA
taatttctactgttgtagattactgttcttccacactctgga

SEQ ID NO: 5916 - RNA, 42 nt, synthetic construct
  misc_feature 1..42: note = Description of Artificial Sequence: Synthetic oligonucleotide
  misc_feature 1..42: note = Category: MG29-1 sgRNA targeting mouse ANGPTL3
  misc_feature 1..42: note = Description: MG29-1-mouse ANGPTL3-sgRNA-B6
  source 1..42: mol_type = other RNA
taatttctactgttgtagattattcttttatcagctcagaaa

SEQ ID NO: 5917 - RNA, 42 nt, synthetic construct
  misc_feature 1..42: note = Description of Artificial Sequence: Synthetic oligonucleotide
  misc_feature 1..42: note = Category: MG29-1 sgRNA targeting mouse ANGPTL3
  misc_feature 1..42: note = Description: MG29-1-mouse ANGPTL3-sgRNA-C6
  source 1..42: mol_type = other RNA
taatttctactgttgtagatatcagctcagaaagactggtat

SEQ ID NO: 5918 - RNA, 42 nt, synthetic construct
  misc_feature 1..42: note = Description of Artificial Sequence: Synthetic oligonucleotide
  misc_feature 1..42: note = Category: MG29-1 sgRNA targeting mouse ANGPTL3
  misc_feature 1..42: note = Description: MG29-1-mouse ANGPTL3-sgRNA-D6
  source 1..42: mol_type = other RNA
taatttctactgttgtagattcagctcagaaagactggtatt

SEQ ID NO: 5919 - RNA, 42 nt, synthetic construct
  misc_feature 1..42: note = Description of Artificial Sequence: Synthetic oligonucleotide
  misc_feature 1..42: note = Category: MG29-1 sgRNA targeting mouse ANGPTL3
  misc_feature 1..42: note = Description: MG29-1-mouse ANGPTL3-sgRNA-E6
  source 1..42: mol_type = other RNA
taatttctactgttgtagatttctaaatcaagagcaccaaga

SEQ ID NO: 5920 - RNA, 42 nt, synthetic construct
  misc_feature 1..42: note = Description of Artificial Sequence: Synthetic oligonucleotide
  misc_feature 1..42: note = Category: MG29-1 sgRNA targeting mouse ANGPTL3
  misc_feature 1..42: note = Description: MG29-1-mouse ANGPTL3-sgRNA-F6
  source 1..42: mol_type = other RNA
taatttctactgttgtagatctgtttcgttcagttgaagagg

SEQ ID NO: 5921 - RNA, 42 nt, synthetic construct
  misc_feature 1..42: note = Description of Artificial Sequence: Synthetic oligonucleotide
  misc_feature 1..42: note = Category: MG29-1 sgRNA targeting mouse ANGPTL3
  misc_feature 1..42: note = Description: MG29-1-mouse ANGPTL3-sgRNA-G6
  source 1..42: mol_type = other RNA
taatttctactgttgtagattgtttcgttcagttgaagaggg

SEQ ID NO: 5922 - RNA, 42 nt, synthetic construct
  misc_feature 1..42: note = Description of Artificial Sequence: Synthetic oligonucleotide
  misc_feature 1..42: note = Category: MG29-1 sgRNA targeting mouse ANGPTL3
  misc_feature 1..42: note = Description: MG29-1-mouse ANGPTL3-sgRNA-H6
  source 1..42: mol_type = other RNA
taatttctactgttgtagatgttcagttgaagagggggagta

SEQ ID NO: 5923 - RNA, 42 nt, synthetic construct
  misc_feature 1..42: note = Description of Artificial Sequence: Synthetic oligonucleotide
  misc_feature 1..42: note = Category: MG29-1 sgRNA targeting mouse ANGPTL3
  misc_feature 1..42: note = Description: MG29-1-mouse ANGPTL3-sgRNA-A7
  source 1..42: mol_type = other RNA
taatttctactgttgtagatgaagaaagagaattttctgagg

SEQ ID NO: 5924 - RNA, 42 nt, synthetic construct
  misc_feature 1..42: note = Description of Artificial Sequence: Synthetic oligonucleotide
  misc_feature 1..42: note = Category: MG29-1 sgRNA targeting mouse ANGPTL3
  misc_feature 1..42: note = Description: MG29-1-mouse ANGPTL3-sgRNA-B7
  source 1..42: mol_type = other RNA
taatttctactgttgtagatctgagggttcttgaataccagt

SEQ ID NO: 5925 - RNA, 42 nt, synthetic construct
  misc_feature 1..42: note = Description of Artificial Sequence: Synthetic oligonucleotide
  misc_feature 1..42: note = Category: MG29-1 sgRNA targeting mouse ANGPTL3
  misc_feature 1..42: note = Description: MG29-1-mouse ANGPTL3-sgRNA-C7
  source 1..42: mol_type = other RNA
taatttctactgttgtagattgagggttcttgaataccagtc

SEQ ID NO: 5926 - RNA, 42 nt, synthetic construct
  misc_feature 1..42: note = Description of Artificial Sequence: Synthetic oligonucleotide
  misc_feature 1..42: note = Category: MG29-1 sgRNA targeting mouse ANGPTL3
  misc_feature 1..42: note = Description: MG29-1-mouse ANGPTL3-sgRNA-D7
  source 1..42: mol_type = other RNA
taatttctactgttgtagattaacagaggcgaacatacaagt

SEQ ID NO: 5927 - RNA, 42 nt, synthetic construct
  misc_feature 1..42: note = Description of Artificial Sequence: Synthetic oligonucleotide
  misc_feature 1..42: note = Category: MG29-1 sgRNA targeting mouse ANGPTL3
  misc_feature 1..42: note = Description: MG29-1-mouse ANGPTL3-sgRNA-E7
  source 1..42: mol_type = other RNA
taatttctactgttgtagatatgtctactgtgatacccaatc

SEQ ID NO: 5928 - RNA, 42 nt, synthetic construct
  misc_feature 1..42: note = Description of Artificial Sequence: Synthetic oligonucleotide
  misc_feature 1..42: note = Category: MG29-1 sgRNA targeting mouse ANGPTL3
  misc_feature 1..42: note = Description: MG29-1-mouse ANGPTL3-sgRNA-F7
  source 1..42: mol_type = other RNA
taatttctactgttgtagatcatgggtttacctgattgggta

SEQ ID NO: 5929 - RNA, 42 nt, synthetic construct
  misc_feature 1..42: note = Description of Artificial Sequence: Synthetic oligonucleotide
  misc_feature 1..42: note = Category: MG29-1 sgRNA targeting mouse ANGPTL3
  misc_feature 1..42: note = Description: MG29-1-mouse ANGPTL3-sgRNA-G7
  source 1..42: mol_type = other RNA
taatttctactgttgtagatcctgattgggtatcacagtaga

SEQ ID NO: 5930 - RNA, 42 nt, synthetic construct
  misc_feature 1..42: note = Description of Artificial Sequence: Synthetic oligonucleotide
  misc_feature 1..42: note = Category: MG29-1 sgRNA targeting mouse ANGPTL3
  misc_feature 1..42: note = Description: MG29-1-mouse ANGPTL3-sgRNA-H7
  source 1..42: mol_type = other RNA
taatttctactgttgtagatttggtttaatagtgtacacgcc

SEQ ID NO: 5931 - RNA, 42 nt, synthetic construct
  misc_feature 1..42: note = Description of Artificial Sequence: Synthetic oligonucleotide
  misc_feature 1..42: note = Category: MG29-1 sgRNA targeting mouse ANGPTL3
  misc_feature 1..42: note = Description: MG29-1-mouse ANGPTL3-sgRNA-A8
  source 1..42: mol_type = other RNA
taatttctactgttgtagatatagtgtacacgccacttgtat

SEQ ID NO: 5932 - RNA, 42 nt, synthetic construct
  misc_feature 1..42: note = Description of Artificial Sequence: Synthetic oligonucleotide
  misc_feature 1..42: note = Category: MG29-1 sgRNA targeting mouse ANGPTL3
  misc_feature 1..42: note = Description: MG29-1-mouse ANGPTL3-sgRNA-B8
  source 1..42: mol_type = other RNA
taatttctactgttgtagatccatcgagcctcccaaagccct

SEQ ID NO: 5933 - RNA, 42 nt, synthetic construct
  misc_feature 1..42: note = Description of Artificial Sequence: Synthetic oligonucleotide
  misc_feature 1..42: note = Category: MG29-1 sgRNA targeting mouse ANGPTL3
  misc_feature 1..42: note = Description: MG29-1-mouse ANGPTL3-sgRNA-C8
  source 1..42: mol_type = other RNA
taatttctactgttgtagatcgtagttttcccatgtttcgtt

SEQ ID NO: 5934 - RNA, 42 nt, synthetic construct
  misc_feature 1..42: note = Description of Artificial Sequence: Synthetic oligonucleotide
  misc_feature 1..42: note = Category: MG29-1 sgRNA targeting mouse ANGPTL3
  misc_feature 1..42: note = Description: MG29-1-mouse ANGPTL3-sgRNA-D8
  source 1..42: mol_type = other RNA
taatttctactgttgtagatgtagttttcccatgtttcgttg

SEQ ID NO: 5935 - RNA, 42 nt, synthetic construct
  misc_feature 1..42: note = Description of Artificial Sequence: Synthetic oligonucleotide
  misc_feature 1..42: note = Category: MG29-1 sgRNA targeting mouse ANGPTL3
  misc_feature 1..42: note = Description: MG29-1-mouse ANGPTL3-sgRNA-E8
  source 1..42: mol_type = other RNA
taatttctactgttgtagatcccatgtttcgttgaagtcctg

SEQ ID NO: 5936 - RNA, 42 nt, synthetic construct
  misc_feature 1..42: note = Description of Artificial Sequence: Synthetic oligonucleotide
  misc_feature 1..42: note = Category: MG29-1 sgRNA targeting mouse ANGPTL3
  misc_feature 1..42: note = Description: MG29-1-mouse ANGPTL3-sgRNA-F8
  source 1..42: mol_type = other RNA
taatttctactgttgtagatccatgtttcgttgaagtcctgt

SEQ ID NO: 5937 - RNA, 42 nt, synthetic construct
  misc_feature 1..42: note = Description of Artificial Sequence: Synthetic oligonucleotide
  misc_feature 1..42: note = Category: MG29-1 sgRNA targeting mouse ANGPTL3
  misc_feature 1..42: note = Description: MG29-1-mouse ANGPTL3-sgRNA-G8
  source 1..42: mol_type = other RNA
taatttctactgttgtagatgttgaagtcctgtgagccatct

SEQ ID NO: 5938 - RNA, 42 nt, synthetic construct
  misc_feature 1..42: note = Description of Artificial Sequence: Synthetic oligonucleotide
  misc_feature 1..42: note = Category: MG29-1 sgRNA targeting mouse ANGPTL3
  misc_feature 1..42: note = Description: MG29-1-mouse ANGPTL3-sgRNA-H8
  source 1..42: mol_type = other RNA
taatttctactgttgtagatcggtgttgaattaatgtccatg

SEQ ID NO: 5939 - RNA, 42 nt, synthetic construct
  misc_feature 1..42: note = Description of Artificial Sequence: Synthetic oligonucleotide
  misc_feature 1..42: note = Category: MG29-1 sgRNA targeting mouse ANGPTL3
  misc_feature 1..42: note = Description: MG29-1-mouse ANGPTL3-sgRNA-A9
  source 1..42: mol_type = other RNA
taatttctactgttgtagatccctctaacttttttctttagg

SEQ ID NO: 5940 - RNA, 42 nt, synthetic construct
  misc_feature 1..42: note = Description of Artificial Sequence: Synthetic oligonucleotide
  misc_feature 1..42: note = Category: MG29-1 sgRNA targeting mouse ANGPTL3
  misc_feature 1..42: note = Description: MG29-1-mouse ANGPTL3-sgRNA-B9
  source 1..42: mol_type = other RNA
taatttctactgttgtagatcctctaacttttttctttagga

SEQ ID NO: 5941 - RNA, 42 nt, synthetic construct
  misc_feature 1..42: note = Description of Artificial Sequence: Synthetic oligonucleotide
  misc_feature 1..42: note = Category: MG29-1 sgRNA targeting mouse ANGPTL3
  misc_feature 1..42: note = Description: MG29-1-mouse ANGPTL3-sgRNA-C9
  source 1..42: mol_type = other RNA
taatttctactgttgtagatttctttaggagaattttggttg

SEQ ID NO: 5942 - RNA, 42 nt, synthetic construct
  misc_feature 1..42: note = Description of Artificial Sequence: Synthetic oligonucleotide
  misc_feature 1..42: note = Category: MG29-1 sgRNA targeting mouse ANGPTL3
  misc_feature 1..42: note = Description: MG29-1-mouse ANGPTL3-sgRNA-D9
  source 1..42: mol_type = other RNA
taatttctactgttgtagattctttaggagaattttggttgg

SEQ ID NO: 5943 - RNA, 42 nt, synthetic construct
  misc_feature 1..42: note = Description of Artificial Sequence: Synthetic oligonucleotide
  misc_feature 1..42: note = Category: MG29-1 sgRNA targeting mouse ANGPTL3
  misc_feature 1..42: note = Description: MG29-1-mouse ANGPTL3-sgRNA-E9
  source 1..42: mol_type = other RNA
taatttctactgttgtagatctttaggagaattttggttggg

SEQ ID NO: 5944 - RNA, 42 nt, synthetic construct
  misc_feature 1..42: note = Description of Artificial Sequence: Synthetic oligonucleotide
  misc_feature 1..42: note = Category: MG29-1 sgRNA targeting mouse ANGPTL3
  misc_feature 1..42: note = Description: MG29-1-mouse ANGPTL3-sgRNA-F9
  source 1..42: mol_type = other RNA
taatttctactgttgtagattttaggagaattttggttgggc

SEQ ID NO: 5945 - RNA, 42 nt, synthetic construct
  misc_feature 1..42: note = Description of Artificial Sequence: Synthetic oligonucleotide
  misc_feature 1..42: note = Category: MG29-1 sgRNA targeting mouse ANGPTL3
  misc_feature 1..42: note = Description: MG29-1-mouse ANGPTL3-sgRNA-G9
  source 1..42: mol_type = other RNA
taatttctactgttgtagatggagaattttggttgggcctag

SEQ ID NO: 5946 - RNA, 42 nt, synthetic construct
  misc_feature 1..42: note = Description of Artificial Sequence: Synthetic oligonucleotide
  misc_feature 1..42: note = Category: MG29-1 sgRNA targeting mouse ANGPTL3
  misc_feature 1..42: note = Description: MG29-1-mouse ANGPTL3-sgRNA-H9
  source 1..42: mol_type = other RNA
taatttctactgttgtagatggttgggcctagagaagatcta

SEQ ID NO: 5947 - RNA, 42 nt, synthetic construct
  misc_feature 1..42: note = Description of Artificial Sequence: Synthetic oligonucleotide
  misc_feature 1..42: note = Category: MG29-1 sgRNA targeting mouse ANGPTL3
  misc_feature 1..42: note = Description: MG29-1-mouse ANGPTL3-sgRNA-A10
  source 1..42: mol_type = other RNA
taatttctactgttgtagatgttgggcctagagaagatctat

SEQ ID NO: 5948 - RNA, 42 nt, synthetic construct
  misc_feature 1..42: note = Description of Artificial Sequence: Synthetic oligonucleotide
  misc_feature 1..42: note = Category: MG29-1 sgRNA targeting mouse ANGPTL3
  misc_feature 1..42: note = Description: MG29-1-mouse ANGPTL3-sgRNA-B10
  source 1..42: mol_type = other RNA
taatttctactgttgtagatacgactcgagctacaagactgg

SEQ ID NO: 5949 - RNA, 42 nt, synthetic construct
  misc_feature 1..42: note = Description of Artificial Sequence: Synthetic oligonucleotide
  misc_feature 1..42: note = Category: MG29-1 sgRNA targeting mouse ANGPTL3
  misc_feature 1..42: note = Description: MG29-1-mouse ANGPTL3-sgRNA-C10
  source 1..42: mol_type = other RNA
taatttctactgttgtagatcgactcgagctacaagactgga

SEQ ID NO: 5950 - RNA, 42 nt, synthetic construct
  misc_feature 1..42: note = Description of Artificial Sequence: Synthetic oligonucleotide
  misc_feature 1..42: note = Category: MG29-1 sgRNA targeting mouse ANGPTL3
  misc_feature 1..42: note = Description: MG29-1-mouse ANGPTL3-sgRNA-D10
  source 1..42: mol_type = other RNA
taatttctactgttgtagatacctgggcagtcacgaaaccaa

SEQ ID NO: 5951 - RNA, 42 nt, synthetic construct
  misc_feature 1..42: note = Description of Artificial Sequence: Synthetic oligonucleotide
  misc_feature 1..42: note = Category: MG29-1 sgRNA targeting mouse ANGPTL3
  misc_feature 1..42: note = Description: MG29-1-mouse ANGPTL3-sgRNA-E10
  source 1..42: mol_type = other RNA
taatttctactgttgtagatgtgactgcccaggtgaaaggag

SEQ ID NO: 5952 - RNA, 42 nt, synthetic construct
  misc_feature 1..42: note = Description of Artificial Sequence: Synthetic oligonucleotide
  misc_feature 1..42: note = Category: MG29-1 sgRNA targeting mouse ANGPTL3
  misc_feature 1..42: note = Description: MG29-1-mouse ANGPTL3-sgRNA-F10
  source 1..42: mol_type = other RNA
taatttctactgttgtagatcagtcttgtagctcgagtcgta

SEQ ID NO: 5953 - DNA, 22 bp, unidentified
  misc_feature 1..22: note = Description of Unknown: MG29-1-mouse ANGPTL3-target site-A1 sequence
  misc_feature 1..22: note = Category: DNA Sequence of ANGPTL3 Target Site
  source 1..22: mol_type = unassigned DNA
tgttgttcctttagtaattgca

SEQ ID NO: 5954 - DNA, 22 bp, unidentified
  misc_feature 1..22: note = Description of Unknown: MG29-1-mouse ANGPTL3-target site-B1 sequence
  misc_feature 1..22: note = Category: DNA Sequence of ANGPTL3 Target Site
  source 1..22: mol_type = unassigned DNA
gttgttcctttagtaattgcat

SEQ ID NO: 5955 - DNA, 22 bp, unidentified
  misc_feature 1..22: note = Description of Unknown: MG29-1-mouse ANGPTL3-target site-C1 sequence
  misc_feature 1..22: note = Category: DNA Sequence of ANGPTL3 Target Site
  source 1..22: mol_type = unassigned DNA
ttgttcctttagtaattgcatc

SEQ ID NO: 5956 - DNA, 22 bp, unidentified
  misc_feature 1..22: note = Description of Unknown: MG29-1-mouse ANGPTL3-target site-D1 sequence
  misc_feature 1..22: note = Category: DNA Sequence of ANGPTL3 Target Site
  source 1..22: mol_type = unassigned DNA
gtaattgcatccagagtggatc

SEQ ID NO: 5957 - DNA, 22 bp, unidentified
  misc_feature 1..22: note = Description of Unknown: MG29-1-mouse ANGPTL3-target site-E1 sequence
  misc_feature 1..22: note = Category: DNA Sequence of ANGPTL3 Target Site
  source 1..22: mol_type = unassigned DNA
atcatttgattctgcaccttca

SEQ ID NO: 5958 - DNA, 22 bp, unidentified
  misc_feature 1..22: note = Description of Unknown: MG29-1-mouse ANGPTL3-target site-F1 sequence
  misc_feature 1..22: note = Category: DNA Sequence of ANGPTL3 Target Site
  source 1..22: mol_type = unassigned DNA
attctgcaccttcagagccaaa

SEQ ID NO: 5959 - DNA, 22 bp, unidentified
  misc_feature 1..22: note = Description of Unknown: MG29-1-mouse ANGPTL3-target site-G1 sequence
  misc_feature 1..22: note = Category: DNA Sequence of ANGPTL3 Target Site
  source 1..22: mol_type = unassigned DNA
ctatgttggatgatgtcaaaat

SEQ ID NO: 5960 - DNA, 22 bp, unidentified
  misc_feature 1..22: note = Description of Unknown: MG29-1-mouse ANGPTL3-target site-H1 sequence
  misc_feature 1..22: note = Category: DNA Sequence of ANGPTL3 Target Site
  source 1..22: mol_type = unassigned DNA
agcgaatggcctcctgcagctg

SEQ ID NO: 5961 - DNA, 22 bp, unidentified
  misc_feature 1..22: note = Description of Unknown: MG29-1-mouse ANGPTL3-target site-A2 sequence
  misc_feature 1..22: note = Category: DNA Sequence of ANGPTL3 Target Site
  source 1..22: mol_type = unassigned DNA
gcgaatggcctcctgcagctgg

SEQ ID NO: 5962 - DNA, 22 bp, unidentified
  misc_feature 1..22: note = Description of Unknown: MG29-1-mouse ANGPTL3-target site-B2 sequence
  misc_feature 1..22: note = Category: DNA Sequence of ANGPTL3 Target Site
  source 1..22: mol_type = unassigned DNA
gtccataagactaagggacaaa

SEQ ID NO: 5963 - DNA, 22 bp, unidentified
  misc_feature 1..22: note = Description of Unknown: MG29-1-mouse ANGPTL3-target site-C2 sequence
  misc_feature 1..22: note = Category: DNA Sequence of ANGPTL3 Target Site
  source 1..22: mol_type = unassigned DNA
tccataagactaagggacaaat

SEQ ID NO: 5964 - DNA, 22 bp, unidentified
  misc_feature 1..22: note = Description of Unknown: MG29-1-mouse ANGPTL3-target site-D2 sequence
  misc_feature 1..22: note = Category: DNA Sequence of ANGPTL3 Target Site
  source 1..22: mol_type = unassigned DNA
agaagctcaacatatttgatca

SEQ ID NO: 5965 - DNA, 22 bp, unidentified
  misc_feature 1..22: note = Description of Unknown: MG29-1-mouse ANGPTL3-target site-E2 sequence
  misc_feature 1..22: note = Category: DNA Sequence of ANGPTL3 Target Site
  source 1..22: mol_type = unassigned DNA
atcagtctttttatgacctatc

SEQ ID NO: 5966 - DNA, 22 bp, unidentified
  misc_feature 1..22: note = Description of Unknown: MG29-1-mouse ANGPTL3-target site-F2 sequence
  misc_feature 1..22: note = Category: DNA Sequence of ANGPTL3 Target Site
  source 1..22: mol_type = unassigned DNA
tatgacctatcacttcgaacca

SEQ ID NO: 5967 - DNA, 22 bp, unidentified
  misc_feature 1..22: note = Description of Unknown: MG29-1-mouse ANGPTL3-target site-G2 sequence
  misc_feature 1..22: note = Category: DNA Sequence of ANGPTL3 Target Site
  source 1..22: mol_type = unassigned DNA
atgacctatcacttcgaaccaa

SEQ ID NO: 5968 - DNA, 22 bp, unidentified
  misc_feature 1..22: note = Description of Unknown: MG29-1-mouse ANGPTL3-target site-H2 sequence
  misc_feature 1..22: note = Category: DNA Sequence of ANGPTL3 Target Site
  source 1..22: mol_type = unassigned DNA
tgacctatcacttcgaaccaat

SEQ ID NO: 5969 - DNA, 22 bp, unidentified
  misc_feature 1..22: note = Description of Unknown: MG29-1-mouse ANGPTL3-target site-A3 sequence
  misc_feature 1..22: note = Category: DNA Sequence of ANGPTL3 Target Site
  source 1..22: mol_type = unassigned DNA
gaggagcagctaaccaacttaa

SEQ ID NO: 5970 - DNA, 22 bp, unidentified
  misc_feature 1..22: note = Description of Unknown: MG29-1-mouse ANGPTL3-target site-B3 sequence
  misc_feature 1..22: note = Category: DNA Sequence of ANGPTL3 Target Site
  source 1..22: mol_type = unassigned DNA
tacttactttgagtgatgttac

SEQ ID NO: 5971 - DNA, 22 bp, unidentified
  misc_feature 1..22: note = Description of Unknown: MG29-1-mouse ANGPTL3-target site-C3 sequence
  misc_feature 1..22: note = Category: DNA Sequence of ANGPTL3 Target Site
  source 1..22: mol_type = unassigned DNA
agtgatgttacttctgggtgct

SEQ ID NO: 5972 - DNA, 22 bp, unidentified
  misc_feature 1..22: note = Description of Unknown: MG29-1-mouse ANGPTL3-target site-D3 sequence
  misc_feature 1..22: note = Category: DNA Sequence of ANGPTL3 Target Site
  source 1..22: mol_type = unassigned DNA
agttcagttctactgacatgtt

SEQ ID NO: 5973 - DNA, 22 bp, unidentified
  misc_feature 1..22: note = Description of Unknown: MG29-1-mouse ANGPTL3-target site-E3 sequence
  misc_feature 1..22: note = Category: DNA Sequence of ANGPTL3 Target Site
  source 1..22: mol_type = unassigned DNA
taacttgtagtgtagatgtagt

SEQ ID NO: 5974 - DNA, 22 bp, unidentified
  misc_feature 1..22: note = Description of Unknown: MG29-1-mouse ANGPTL3-target site-F3 sequence
  misc_feature 1..22: note = Category: DNA Sequence of ANGPTL3 Target Site
  source 1..22: mol_type = unassigned DNA
aacttgtagtgtagatgtagtt

SEQ ID NO: 5975 - DNA, 22 bp, unidentified
  misc_feature 1..22: note = Description of Unknown: MG29-1-mouse ANGPTL3-target site-G3 sequence
  misc_feature 1..22: note = Category: DNA Sequence of ANGPTL3 Target Site
  source 1..22: mol_type = unassigned DNA
acttgtagtgtagatgtagttc

SEQ ID NO: 5976 - DNA, 22 bp, unidentified
  misc_feature 1..22: note = Description of Unknown: MG29-1-mouse ANGPTL3-target site-H3 sequence
  misc_feature 1..22: note = Category: DNA Sequence of ANGPTL3 Target Site
  source 1..22: mol_type = unassigned DNA
cctcttctttgatttcattggt

SEQ ID NO: 5977 - DNA, 22 bp, unidentified
  misc_feature 1..22: note = Description of Unknown: MG29-1-mouse ANGPTL3-target site-A4 sequence
  misc_feature 1..22: note = Category: DNA Sequence of ANGPTL3 Target Site
  source 1..22: mol_type = unassigned DNA
ctcttctttgatttcattggtt

SEQ ID NO: 5978 - DNA, 22 bp, unidentified
  misc_feature 1..22: note = Description of Unknown: MG29-1-mouse ANGPTL3-target site-B4 sequence
  misc_feature 1..22: note = Category: DNA Sequence of ANGPTL3 Target Site
  source 1..22: mol_type = unassigned DNA
atttcattggttcgaagtgata

SEQ ID NO: 5979 - DNA, 22 bp, unidentified
  misc_feature 1..22: note = Description of Unknown: MG29-1-mouse ANGPTL3-target site-C4 sequence
  misc_feature 1..22: note = Category: DNA Sequence of ANGPTL3 Target Site
  source 1..22: mol_type = unassigned DNA
attggttcgaagtgataggtca

SEQ ID NO: 5980 - DNA, 22 bp, unidentified
  misc_feature 1..22: note = Description of Unknown: MG29-1-mouse ANGPTL3-target site-D4 sequence
  misc_feature 1..22: note = Category: DNA Sequence of ANGPTL3 Target Site
  source 1..22: mol_type = unassigned DNA
tcccttagtcttatggacaaaa

SEQ ID NO: 5981 - DNA, 22 bp, unidentified
  misc_feature 1..22: note = Description of Unknown: MG29-1-mouse ANGPTL3-target site-E4 sequence
  misc_feature 1..22: note = Category: DNA Sequence of ANGPTL3 Target Site
  source 1..22: mol_type = unassigned DNA
agtccatgacccagctgcagga

SEQ ID NO: 5982 - DNA, 22 bp, unidentified
  misc_feature 1..22: note = Description of Unknown: MG29-1-mouse ANGPTL3-target site-F4 sequence
  misc_feature 1..22: note = Category: DNA Sequence of ANGPTL3 Target Site
  source 1..22: mol_type = unassigned DNA
gacatcatccaacatagcaaat

SEQ ID NO: 5983 - DNA, 22 bp, unidentified
  misc_feature 1..22: note = Description of Unknown: MG29-1-mouse ANGPTL3-target site-G4 sequence
  misc_feature 1..22: note = Category: DNA Sequence of ANGPTL3 Target Site
  source 1..22: mol_type = unassigned DNA
acatcatccaacatagcaaatc

SEQ ID NO: 5984 - DNA, 22 bp, unidentified
  misc_feature 1..22: note = Description of Unknown: MG29-1-mouse ANGPTL3-target site-H4 sequence
  misc_feature 1..22: note = Category: DNA Sequence of ANGPTL3 Target Site
  source 1..22: mol_type = unassigned DNA
ggctctgaaggtgcagaatcaa

SEQ ID NO: 5985 - DNA, 22 bp, unidentified
  misc_feature 1..22: note = Description of Unknown: MG29-1-mouse ANGPTL3-target site-A5 sequence
  misc_feature 1..22: note = Category: DNA Sequence of ANGPTL3 Target Site
  source 1..22: mol_type = unassigned DNA
gctctgaaggtgcagaatcaaa

SEQ ID NO: 5986 - DNA, 22 bp, unidentified
  misc_feature 1..22: note = Description of Unknown: MG29-1-mouse ANGPTL3-target site-B5 sequence
  misc_feature 1..22: note = Category: DNA Sequence of ANGPTL3 Target Site
  source 1..22: mol_type = unassigned DNA
gtagaacagcaagacaacagca

SEQ ID NO: 5987 - DNA, 22 bp, unidentified
  misc_feature 1..22: note = Description of Unknown: MG29-1-mouse ANGPTL3-target site-C5 sequence
  misc_feature 1..22: note = Category: DNA Sequence of ANGPTL3 Target Site
  source 1..22: mol_type = unassigned DNA
tagaacagcaagacaacagcat

SEQ ID NO: 5988 - DNA, 22 bp, unidentified
  misc_feature 1..22: note = Description of Unknown: MG29-1-mouse ANGPTL3-target site-D5 sequence
  misc_feature 1..22: note = Category: DNA Sequence of ANGPTL3 Target Site
  source 1..22: mol_type = unassigned DNA
ctatttcttttatctgcatgtg

SEQ ID NO: 5989 - DNA, 22 bp, unidentified
  misc_feature 1..22: note = Description of Unknown: MG29-1-mouse ANGPTL3-target site-E5 sequence
  misc_feature 1..22: note = Category: DNA Sequence of ANGPTL3 Target Site
  source 1..22: mol_type = unassigned DNA
tatttcttttatctgcatgtgc

SEQ ID NO: 5990 - DNA, 22 bp, unidentified
  misc_feature 1..22: note = Description of Unknown: MG29-1-mouse ANGPTL3-target site-F5 sequence
  misc_feature 1..22: note = Category: DNA Sequence of ANGPTL3 Target Site
  source 1..22: mol_type = unassigned DNA
ttttatctgcatgtgctgttga

SEQ ID NO: 5991 - DNA, 22 bp, unidentified
  misc_feature 1..22: note = Description of Unknown: MG29-1-mouse ANGPTL3-target site-G5 sequence
  misc_feature 1..22: note = Category: DNA Sequence of ANGPTL3 Target Site
  source 1..22: mol_type = unassigned DNA
atctgcatgtgctgttgactta

SEQ ID NO: 5992 - DNA, 22 bp, unidentified
  misc_feature 1..22: note = Description of Unknown: MG29-1-mouse ANGPTL3-target site-H5 sequence
  misc_feature 1..22: note = Category: DNA Sequence of ANGPTL3 Target Site
  source 1..22: mol_type = unassigned DNA
tctgcatgtgctgttgacttaa

SEQ ID NO: 5993 - DNA, 22 bp, unidentified
  misc_feature 1..22: note = Description of Unknown: MG29-1-mouse ANGPTL3-target site-A6 sequence
  misc_feature 1..22: note = Category: DNA Sequence of ANGPTL3 Target Site
  source 1..22: mol_type = unassigned DNA
tactgttcttccacactctgga

SEQ ID NO: 5994 - DNA, 22 bp, unidentified
  misc_feature 1..22: note = Description of Unknown: MG29-1-mouse ANGPTL3-target site-B6 sequence
  misc_feature 1..22: note = Category: DNA Sequence of ANGPTL3 Target Site
  source 1..22: mol_type = unassigned DNA
tattcttttatcagctcagaaa

SEQ ID NO: 5995 - DNA, 22 bp, unidentified
  misc_feature 1..22: note = Description of Unknown: MG29-1-mouse ANGPTL3-target site-C6 sequence
  misc_feature 1..22: note = Category: DNA Sequence of ANGPTL3 Target Site
  source 1..22: mol_type = unassigned DNA
atcagctcagaaagactggtat

SEQ ID NO: 5996 - DNA, 22 bp, unidentified
  misc_feature 1..22: note = Description of Unknown: MG29-1-mouse ANGPTL3-target site-D6 sequence
  misc_feature 1..22: note = Category: DNA Sequence of ANGPTL3 Target Site
  source 1..22: mol_type = unassigned DNA
tcagctcagaaagactggtatt

SEQ ID NO: 5997 - DNA, 22 bp, unidentified
  misc_feature 1..22: note = Description of Unknown: MG29-1-mouse ANGPTL3-target site-E6 sequence
  misc_feature 1..22: note = Category: DNA Sequence of ANGPTL3 Target Site
  source 1..22: mol_type = unassigned DNA
ttctaaatcaagagcaccaaga

SEQ ID NO: 5998 - DNA, 22 bp, unidentified
  misc_feature 1..22: note = Description of Unknown: MG29-1-mouse ANGPTL3-target site-F6 sequence
  misc_feature 1..22: note = Category: DNA Sequence of ANGPTL3 Target Site
  source 1..22: mol_type = unassigned DNA
ctgtttcgttcagttgaagagg

SEQ ID NO: 5999 - DNA, 22 bp, unidentified
  misc_feature 1..22: note = Description of Unknown: MG29-1-mouse ANGPTL3-target site-G6 sequence
  misc_feature 1..22: note = Category: DNA Sequence of ANGPTL3 Target Site
  source 1..22: mol_type = unassigned DNA
tgtttcgttcagttgaagaggg

SEQ ID NO: 6000 - DNA, 22 bp, unidentified
  misc_feature 1..22: note = Description of Unknown: MG29-1-mouse ANGPTL3-target site-H6 sequence
  misc_feature 1..22: note = Category: DNA Sequence of ANGPTL3 Target Site
  source 1..22: mol_type = unassigned DNA
gttcagttgaagagggggagta

SEQ ID NO: 6001 - DNA, 22 bp, unidentified
  misc_feature 1..22: note = Description of Unknown: MG29-1-mouse ANGPTL3-target site-A7 sequence
  misc_feature 1..22: note = Category: DNA Sequence of ANGPTL3 Target Site
  source 1..22: mol_type = unassigned DNA
gaagaaagagaattttctgagg

SEQ ID NO: 6002 - DNA, 22 bp, unidentified
  misc_feature 1..22: note = Description of Unknown: MG29-1-mouse ANGPTL3-target site-B7 sequence
  misc_feature 1..22: note = Category: DNA Sequence of ANGPTL3 Target Site
  source 1..22: mol_type = unassigned DNA
ctgagggttcttgaataccagt

SEQ ID NO: 6003 - DNA, 22 bp, unidentified
  misc_feature 1..22: note = Description of Unknown: MG29-1-mouse ANGPTL3-target site-C7 sequence
  misc_feature 1..22: note = Category: DNA Sequence of ANGPTL3 Target Site
  source 1..22: mol_type = unassigned DNA
tgagggttcttgaataccagtc

SEQ ID NO: 6004 - DNA, 22 bp, unidentified
  misc_feature 1..22: note = Description of Unknown: MG29-1-mouse ANGPTL3-target site-D7 sequence
  misc_feature 1..22: note = Category: DNA Sequence of ANGPTL3 Target Site
  source 1..22: mol_type = unassigned DNA
taacagaggcgaacatacaagt

SEQ ID NO: 6005 - DNA, 22 bp, unidentified
  misc_feature 1..22: note = Description of Unknown: MG29-1-mouse ANGPTL3-target site-E7 sequence
  misc_feature 1..22: note = Category: DNA Sequence of ANGPTL3 Target Site
  source 1..22: mol_type = unassigned DNA
atgtctactgtgatacccaatc

SEQ ID NO: 6006 - DNA, 22 bp, unidentified
  misc_feature 1..22: note = Description of Unknown: MG29-1-mouse ANGPTL3-target site-F7 sequence
  misc_feature 1..22: note = Category: DNA Sequence of ANGPTL3 Target Site
  source 1..22: mol_type = unassigned DNA
catgggtttacctgattgggta

SEQ ID NO: 6007 - DNA, 22 bp, unidentified
  misc_feature 1..22: note = Description of Unknown: MG29-1-mouse ANGPTL3-target site-G7 sequence
  misc_feature 1..22: note = Category: DNA Sequence of ANGPTL3 Target Site
  source 1..22: mol_type = unassigned DNA
cctgattgggtatcacagtaga

SEQ ID NO: 6008 - DNA, 22 bp, unidentified
  misc_feature 1..22: note = Description of Unknown: MG29-1-mouse ANGPTL3-target site-H7 sequence
  misc_feature 1..22: note = Category: DNA Sequence of ANGPTL3 Target Site
  source 1..22: mol_type = unassigned DNA
ttggtttaatagtgtacacgcc

SEQ ID NO: 6009 - DNA, 22 bp, unidentified
  misc_feature 1..22: note = Description of Unknown: MG29-1-mouse ANGPTL3-target site-A8 sequence
  misc_feature 1..22: note = Category: DNA Sequence of ANGPTL3 Target Site
  source 1..22: mol_type = unassigned DNA
atagtgtacacgccacttgtat

SEQ ID NO: 6010 - DNA, 22 bp, unidentified
  misc_feature 1..22: note = Description of Unknown: MG29-1-mouse ANGPTL3-target site-B8 sequence
  misc_feature 1..22: note = Category: DNA Sequence of ANGPTL3 Target Site
  source 1..22: mol_type = unassigned DNA
ccatcgagcctcccaaagccct

SEQ ID NO: 6011 - DNA, 22 bp, unidentified
  misc_feature 1..22: note = Description of Unknown: MG29-1-mouse ANGPTL3-target site-C8 sequence
  misc_feature 1..22: note = Category: DNA Sequence of ANGPTL3 Target Site
  source 1..22: mol_type = unassigned DNA
cgtagttttcccatgtttcgtt

SEQ ID NO: 6012 - DNA, 22 bp, unidentified
  misc_feature 1..22: note = Description of Unknown: MG29-1-mouse ANGPTL3-target site-D8 sequence
  misc_feature 1..22: note = Category: DNA Sequence of ANGPTL3 Target Site
  source 1..22: mol_type = unassigned DNA
gtagttttcccatgtttcgttg

SEQ ID NO: 6013 - DNA, 22 bp, unidentified
  misc_feature 1..22: note = Description of Unknown: MG29-1-mouse ANGPTL3-target site-E8 sequence
  misc_feature 1..22: note = Category: DNA Sequence of ANGPTL3 Target Site
  source 1..22: mol_type = unassigned DNA
cccatgtttcgttgaagtcctg

SEQ ID NO: 6014 - DNA, 22 bp, unidentified
  misc_feature 1..22: note = Description of Unknown: MG29-1-mouse ANGPTL3-target site-F8 sequence
  misc_feature 1..22: note = Category: DNA Sequence of ANGPTL3 Target Site
  source 1..22: mol_type = unassigned DNA
ccatgtttcgttgaagtcctgt

SEQ ID NO: 6015 - DNA, 22 bp, unidentified
  misc_feature 1..22: note = Description of Unknown: MG29-1-mouse ANGPTL3-target site-G8 sequence
  misc_feature 1..22: note = Category: DNA Sequence of ANGPTL3 Target Site
  source 1..22: mol_type = unassigned DNA
gttgaagtcctgtgagccatct

SEQ ID NO: 6016 - DNA, 22 bp, unidentified
  misc_feature 1..22: note = Description of Unknown: MG29-1-mouse ANGPTL3-target site-H8 sequence
  misc_feature 1..22: note = Category: DNA Sequence of ANGPTL3 Target Site
  source 1..22: mol_type = unassigned DNA
cggtgttgaattaatgtccatg

SEQ ID NO: 6017 - DNA, 22 bp, unidentified
  misc_feature 1..22: note = Description of Unknown: MG29-1-mouse ANGPTL3-target site-A9 sequence
  misc_feature 1..22: note = Category: DNA Sequence of ANGPTL3 Target Site
  source 1..22: mol_type = unassigned DNA
ccctctaacttttttctttagg

SEQ ID NO: 6018 - DNA, 22 bp, unidentified
  misc_feature 1..22: note = Description of Unknown: MG29-1-mouse ANGPTL3-target site-B9 sequence
  misc_feature 1..22: note = Category: DNA Sequence of ANGPTL3 Target Site
  source 1..22: mol_type = unassigned DNA
cctctaacttttttctttagga

SEQ ID NO: 6019 - DNA, 22 bp, unidentified
  misc_feature 1..22: note = Description of Unknown: MG29-1-mouse ANGPTL3-target site-C9 sequence
  misc_feature 1..22: note = Category: DNA Sequence of ANGPTL3 Target Site
  source 1..22: mol_type = unassigned DNA
ttctttaggagaattttggttg

SEQ ID NO: 6020 - DNA, 22 bp, unidentified
  misc_feature 1..22: note = Description of Unknown: MG29-1-mouse ANGPTL3-target site-D9 sequence
  misc_feature 1..22: note = Category: DNA Sequence of ANGPTL3 Target Site
  source 1..22: mol_type = unassigned DNA
tctttaggagaattttggttgg

SEQ ID NO: 6021 - DNA, 22 bp, unidentified
  misc_feature 1..22: note = Description of Unknown: MG29-1-mouse ANGPTL3-target site-E9 sequence
  misc_feature 1..22: note = Category: DNA Sequence of ANGPTL3 Target Site
  source 1..22: mol_type = unassigned DNA
ctttaggagaattttggttggg

SEQ ID NO: 6022 - DNA, 22 bp, unidentified
  misc_feature 1..22: note = Description of Unknown: MG29-1-mouse ANGPTL3-target site-F9 sequence
  misc_feature 1..22: note = Category: DNA Sequence of ANGPTL3 Target Site
  source 1..22: mol_type = unassigned DNA
tttaggagaattttggttgggc

SEQ ID NO: 6023 - DNA, 22 bp, unidentified
  misc_feature 1..22: note = Description of Unknown: MG29-1-mouse ANGPTL3-target site-G9 sequence
  misc_feature 1..22: note = Category: DNA Sequence of ANGPTL3 Target Site
  source 1..22: mol_type = unassigned DNA
ggagaattttggttgggcctag

SEQ ID NO: 6024 - DNA, 22 bp, unidentified
  misc_feature 1..22: note = Description of Unknown: MG29-1-mouse ANGPTL3-target site-H9 sequence
  misc_feature 1..22: note = Category: DNA Sequence of ANGPTL3 Target Site
  source 1..22: mol_type = unassigned DNA
ggttgggcctagagaagatcta

SEQ ID NO: 6025 - DNA, 22 bp, unidentified
  misc_feature 1..22: note = Description of Unknown: MG29-1-mouse ANGPTL3-target site-A10 sequence
  misc_feature 1..22: note = Category: DNA Sequence of ANGPTL3 Target Site
  source 1..22: mol_type = unassigned DNA
gttgggcctagagaagatctat

SEQ ID NO: 6026 - DNA, 22 bp, unidentified
  misc_feature 1..22: note = Description of Unknown: MG29-1-mouse ANGPTL3-target site-B10 sequence
  misc_feature 1..22: note = Category: DNA Sequence of ANGPTL3 Target Site
  source 1..22: mol_type = unassigned DNA
acgactcgagctacaagactgg

SEQ ID NO: 6027 - DNA, 22 bp, unidentified
  misc_feature 1..22: note = Description of Unknown: MG29-1-mouse ANGPTL3-target site-C10 sequence
  misc_feature 1..22: note = Category: DNA Sequence of ANGPTL3 Target Site
  source 1..22: mol_type = unassigned DNA
cgactcgagctacaagactgga

SEQ ID NO: 6028 - DNA, 22 bp, unidentified
  misc_feature 1..22: note = Description of Unknown: MG29-1-mouse ANGPTL3-target site-D10 sequence
  misc_feature 1..22: note = Category: DNA Sequence of ANGPTL3 Target Site
  source 1..22: mol_type = unassigned DNA
acctgggcagtcacgaaaccaa

SEQ ID NO: 6029 - DNA, 22 bp, unidentified
  misc_feature 1..22: note = Description of Unknown: MG29-1-mouse ANGPTL3-target site-E10 sequence
  misc_feature 1..22: note = Category: DNA Sequence of ANGPTL3 Target Site
  source 1..22: mol_type = unassigned DNA
gtgactgcccaggtgaaaggag

SEQ ID NO: 6030 - DNA, 22 bp, unidentified
  misc_feature 1..22: note = Description of Unknown: MG29-1-mouse ANGPTL3-target site-F10 sequence
  misc_feature 1..22: note = Category: DNA Sequence of ANGPTL3 Target Site
  source 1..22: mol_type = unassigned DNA
cagtcttgtagctcgagtcgta

SEQ ID NO: 6031 - DNA, 133 bp, unidentified
  misc_feature 1..133: note = Description of Unknown: uncultivated organism sequence
  misc_feature 1..133: note = Category: MG55 active effector sgRNA
  misc_feature 1..133: note = Description: MG55 sgRNA
  source 1..133: mol_type = unassigned DNA
aaatatttcattaagtaccgaatttaaaaaataggattgcagaaagtgcaattaggctggttgtgcagccttaatctgagggattaatccactcggaaagtacctttattgaaaaatgaaaggtattcacaac

SEQ ID NO: 6032 - skipped

SEQ ID NO: 6033 - RNA, 198 nt, unidentified
  misc_feature 1..198: note = Description of Unknown: uncultivated organism sequence
  misc_feature 1..198: note = Category: MG91 active effector sgRNA
  misc_feature 1..198: note = Description: MG91-15 sgRNA1
  source 1..198: mol_type = unassigned RNA
tagagaaaattatatattaggttttgttaagcctaacaatcgttaagtgttctttggaatattgattgtaaatctattttgggaaatgaaaaggcaaaaattacagttatcaattaattgagaagagtatagagtcagttttatagtaccaaaatataccttaattctttaagaaattaaatttaaggtaataacaag

SEQ ID NO: 6034 - RNA, 191 nt, unidentified
  misc_feature 1..191: note = Description of Unknown: uncultivated organism sequence
  misc_feature 1..191: note = Category: MG91 active effector sgRNA
  misc_feature 1..191: note = Description: MG91-32 sgRNA1
  source 1..191: mol_type = unassigned RNA
tgcacatcgggtatgtgtggggtcgagtaaggccgacgttgtccgctacaacttagccgtcgggcggttgggcaaccgatcggaagcggaacctggaataaggccaggcagcggcactgccgtcaagcgggaatgaagtccagtagtacgtaaccagtaacttacaaagaaatttgtaaggtacttacagg

SEQ ID NO: 6035 - RNA, 231 nt, unidentified
  misc_feature 1..231: note = Description of Unknown: uncultivated organism sequence
  misc_feature 1..231: note = Category: MG91 active effector sgRNA
  misc_feature 1..231: note = Description: MG91-87 sgRNA1
  source 1..231: mol_type = unassigned RNA
gaattgatgcttcgtgcatctaaaaatatactgggaattgtattcccgaagtgagcgttaattggcacagtggtgtcattgctcatcaaaagaagaattggaaaaacagcgaacttcatctcgtttcttcacctttggtgcaagcaaaggtaatgaagtgaaggctttttagtacaatctcatacccctaactgtgtgatactatgccctcgaaagaggggtaaatacagg

SEQ ID NO: 6036 - RNA, 200 nt, unidentified
  misc_feature 1..200: note = Description of Unknown: uncultivated organism sequence
  misc_feature 1..200: note = Category: MG91 active effector sgRNA
  misc_feature 1..200: note = Description: MG91-87 sgRNA2
  source 1..200: mol_type = unassigned RNA
tgggaattgtattcccgaagtgagcgttaattggcacagtggtgtcattgctcatcaaaagaagaattggaaaaacagcgaacttcatctcgtttcttcacctttggtgcaagcaaaggtaatgaagtgaaggctttttagtacaatctcatacccctaactgtgtgatactatgccctcgaaagaggggtaaatacagg

SEQ ID NO: 6037-6039 - skipped (3 entries)

SEQ ID NO: 6040 - DNA, 203 bp, unidentified
  misc_feature 1..203: note = Description of Unknown: uncultivated organism sequence
  misc_feature 1..203: note = Category: MG91 intergenic region potentially encoding tracrRNA
  misc_feature 1..203: note = Description: MG91-2 IG2
  source 1..203: mol_type = unassigned DNA
aaataacatacagaggttttgttaagcctcacaatcttaataaataagtgttctttgaaaatatttagttgattgtaaatctattttgggaaataaaaaaacaaaaattacagttattagttaactaagaagagtatagagttagttttaaagtaccaaaatataccctaaattattgtttttcaaaactttatagaatatat

SEQ ID NO: 6041 - DNA, 648 bp, unidentified
  misc_feature 1..648: note = Description of Unknown: uncultivated organism sequence
  misc_feature 1..648: note = Category: MG91 intergenic region potentially encoding tracrRNA
  misc_feature 1..648: note = Description: MG91-10 IG1
  source 1..648: mol_type = unassigned DNA
tatggcgtgtaatcacctgggaatgaaataaaaaggccatgatttgcatactcggagacctgctctatactcccattcccgaaggaactgactgttatttttgcattctaccattctgcataatcgtttgtcgcaccagccgcccactggcattagcttaacgtacgcaaggcctgacaacacctttatgtcgcaaatatacgaattattattgaaagtgcgtacagaattcagaatgaaagtgctatactttaacagtatttatccaaaacgtttaatatcttacacatcaattcatgtttgtaaatcacatttcatttattaatcagacctgtttaacgtagtaacaagaacgaaattactgactttcaatctgccttctatatgatagcagaaaaattctctagagaatttcttcctgtataactaagtagcaaatgctatatcacttagtaaggacaaaattctctagagaatttctttactactctacagctaagaaatgaggaacaacagactgggttttactttataaccgatagagatggaacgggtgagtgtcggaagatgtttaaatcaagattatcgagaaataattggcattctcaggagtatttactaaatttgcacgaaaatacgaaaagcatt

SEQ ID NO: 6042 - DNA, 192 bp, unidentified
  misc_feature 1..192: note = Description of Unknown: uncultivated organism sequence
  misc_feature 1..192: note = Category: MG91 intergenic region potentially encoding tracrRNA
  misc_feature 1..192: note = Description: MG91-52 IG1
  source 1..192: mol_type = unassigned DNA
gatataaagaggcattgtcaggcctcgcggacgttaagctaatgccggtgggcggctggtccgacgaattggtgagtggaagaggaatgcgaaaatgacagtcaccctcgtaagagggctgagttatagagtatatccgcgagtacgcaagccgtgactacatactggcattgagccagttagacattatga

SEQ ID NO: 6043 - DNA, 428 bp, unidentified
  misc_feature 1..428: note = Description of Unknown: uncultivated organism sequence
  misc_feature 1..428: note = Category: MG91 intergenic region potentially encoding tracrRNA
  misc_feature 1..428: note = Description: MG91-61 IG2
  source 1..428: mol_type = unassigned DNA
taattaaggttgtgatctttatgattgagattgcaacctttttttaaaaaaatatgcaacaaaacgccccaaaacgcatcatttaggggtgttagggtcttgaatttgttaaatcaagacttttattttgaatattttggctccacaagggaattttcgcaattttgcactgcacaccagcaatggcgtgtgggggcttgtaggcccgacgcatcctcgctttaaaactcagccatcgggcggttatggggagctgaacggaaacggaaatgggaataagacaatgcagcgcaagcagagcgtggatgaagtctcagagtacgcgaccattgacttgcaaaaagtgatctttgaccaactgaagggtgtaatacacaccgctgtaaggcaaatacaggctgcagactggccatcccagaatacaataa

SEQ ID NO: 6044 - DNA, 192 bp, unidentified
  misc_feature 1..192: note = Description of Unknown: uncultivated organism sequence
  misc_feature 1..192: note = Category: MG91 intergenic region potentially encoding tracrRNA
  misc_feature 1..192: note = Description: MG91-69 IG2
  source 1..192: mol_type = unassigned DNA
taaaaaaagatattaggttttgttaagcctaacaatcgttaagtgttctttggaatattgattgtaaatctattttgggaaataaaaaagcaaaaattacagttatcagtttactgagaagagtatagagttagttttaaagtaccaaaatataccctaaattattgtttttcaaaactttatagaatatat

SEQ ID NO: 6045 - DNA, 345 bp, unidentified
  misc_feature 1..345: note = Description of Unknown: uncultivated organism sequence
  misc_feature 1..345: note = Category: MG91 intergenic region potentially encoding tracrRNA
  misc_feature 1..345: note = Description: MG91-94 IG1
  source 1..345: mol_type = unassigned DNA
ccgtagtgcataatcacctgagaatgaatgaaaaaggccatgatatgcatacttggggacttgctctatactcccattcccgaaggaattgactgttatttttgcattccaccattctgcaaatcgtttgtcgcaccagccgcccactggcattaagcttaacgtgcgcaaggcctgacaacacctttatgggtgcaaagatactaaaagttttcaaaagaagatagggaaaagagaaaaaacttcaaatccattttggcgttgcagcgttgcagtgttgcagttccaaaatagattctgcgatagtcaaaaaataactctatatttaataaatatagaagtatt

SEQ ID NO: 6046 - DNA, 448 bp, unidentified
  misc_feature 1..448: note = Description of Unknown: uncultivated organism sequence
  misc_feature 1..448: note = Category: MG91 intergenic region potentially encoding tracrRNA
  misc_feature 1..448: note = Description: MG91-101 IG2
  source 1..448: mol_type = unassigned DNA
ttcaggaattcaaagatcaccttttttgcaagttactggtcacgtactactggacttcattcctgcttgacggcagtgccgctgcatggccttattccaggttccgcttccgattggctgcccaaccgcccgacggctaagttgtagcggacagcgttggccctacaagaccccacacattcccgatgtgcattgcaaagttcgggaatgatatcgagaaaggcaaaatctggcaaaactttgtcttgatttaacacatttatgatttttccggcgaaaaaatggtcgcgaaaaatgtcatccaggatatatgaagactccagcggaaaaaggtttaacgccgttgtaaacttagttttctttggagtaaacagggtaacctcttgtggaaattcggacaggatgagtgttgattgctttatccggatgttattttgctatagtattt

SEQ ID NO: 6047 - DNA, 196 bp, unidentified
  misc_feature 1..196: note = Description of Unknown: uncultivated organism sequence
  misc_feature 1..196: note = Category: MG91 intergenic region potentially encoding tracrRNA
  misc_feature 1..196: note = Description: MG91-107 IG2
  source 1..196: mol_type = unassigned DNA
gtataaacactattggactgtgacaaataaagttaggataggatgttcttactttaaatagtatttgctatcgttcaaaaaggcaagatagccatttttacatgataacattctgctttatttcatcacatctttgttttagcaatggcaattgtttgccattaacgctaagattggattacaaatccatatttct

SEQ ID NO: 6048 - DNA, 316 bp, unidentified
  misc_feature 1..316: note = Description of Unknown: uncultivated organism sequence
  misc_feature 1..316: note = Category: MG91 intergenic region potentially encoding tracrRNA
  misc_feature 1..316: note = Description: MG91-155 IG1
  source 1..316: mol_type = unassigned DNA
cctatggttggtaatcacctaggaatgaataaaaagactatgataagcatactcggggacttgctctatactcccgttctcgaaggaactgactgttatttttgcattccaccattctgcaaatcgtttgtcggaccagccgcccactggcattagcttgacgtccgcaaggcctaacaacgcctttcttttgcaaatatacggatttatatttctttcacaaaattaatgaggaactttttcatattccttttgtccatctgttactgccacatgatttttcgtaggaaagaccttggaggcggatggattgaaa

SEQ ID NO: 6049 - DNA, 205 bp, unidentified
  misc_feature 1..205: note = Description of Unknown: uncultivated organism sequence
  misc_feature 1..205: note = Category: MG91 intergenic region potentially encoding tracrRNA
  misc_feature 1..205: note = Description: MG91-201 IG2
  source 1..205: mol_type = unassigned DNA
atatattctataaagttttgaaaaacaataatttagggtatattttggtactttaaaactaactctatactcttcttagttaactaataactgtaatttttgtttttttatttcccaaaatagatttacaatcaactaaatatttcaaagaacacttaattattaagattgtgaggcttaacaaaacctctgtatgttatttttt

SEQ ID NO: 6050 - DNA, 36 bp, unidentified
  misc_feature 1..36: note = Description of Unknown: uncultivated organism sequence
  misc_feature 1..36: note = Category: MG91 CRISPR repeat
  misc_feature 1..36: note = Description: MG91-2 Repeat
  source 1..36: mol_type = unassigned DNA
ggtagatatacctattaaagttagggtactaacaag

SEQ ID NO: 6051 - DNA, 36 bp, unidentified
  misc_feature 1..36: note = Description of Unknown: uncultivated organism sequence
  misc_feature 1..36: note = Category: MG91 CRISPR repeat
  misc_feature 1..36: note = Description: MG91-10 Repeat
  source 1..36: mol_type = unassigned DNA
ggtgttaatcacccggaaatgtaggctattgacagg

SEQ ID NO: 6052 - DNA, 36 bp, unidentified
  misc_feature 1..36: note = Description of Unknown: uncultivated organism sequence
  misc_feature 1..36: note = Category: MG91 CRISPR repeat
  misc_feature 1..36: note = Description: MG91-52 Repeat
  source 1..36: mol_type = unassigned DNA
ggtgtaagacacctggaaatgtaaggcattgacagg

SEQ ID NO: 6053 - DNA, 36 bp, unidentified
  misc_feature 1..36: note = Description of Unknown: uncultivated organism sequence
  misc_feature 1..36: note = Category: MG91 CRISPR repeat
  misc_feature 1..36: note = Description: MG91-61 Repeat
  source 1..36: mol_type = unassigned DNA
cctgtatttggcttacaaattaggatgattaacacc

SEQ ID NO: 6054 - DNA, 36 bp, unidentified
  misc_feature 1..36: note = Description of Unknown: uncultivated organism sequence
  misc_feature 1..36: note = Category: MG91 CRISPR repeat
  misc_feature 1..36: note = Description: MG91-69 Repeat
  source 1..36: mol_type = unassigned DNA
ggtgtatatacctaataaagttagggtactaacaag

SEQ ID NO: 6055 - DNA, 37 bp, unidentified
  misc_feature 1..37: note = Description of Unknown: uncultivated organism sequence
  misc_feature 1..37: note = Category: MG91 CRISPR repeat
  misc_feature 1..37: note = Description: MG91-94 Repeat
  source 1..37: mol_type = unassigned DNA
ggtgttaatcacccgaaaatgtaggtcattgacagga

SEQ ID NO: 6056 - DNA, 37 bp, unidentified
  misc_feature 1..37: note = Description of Unknown: uncultivated organism sequence
  misc_feature 1..37: note = Category: MG91 CRISPR repeat
  misc_feature 1..37: note = Description: MG91-101 Repeat
  source 1..37: mol_type = unassigned DNA
gggtgttacacacccgaatttgcaaggtacttacagg

SEQ ID NO: 6057 - DNA, 36 bp, unidentified
  misc_feature 1..36: note = Description of Unknown: uncultivated organism sequence
  misc_feature 1..36: note = Category: MG91 CRISPR repeat
  misc_feature 1..36: note = Description: MG91-107 Repeat
  source 1..36: mol_type = unassigned DNA
cctgtatgtgactttgaaatatagggtagttacaag

SEQ ID NO: 6058 - DNA, 36 bp, unidentified
  misc_feature 1..36: note = Description of Unknown: uncultivated organism sequence
  misc_feature 1..36: note = Category: MG91 CRISPR repeat
  misc_feature 1..36: note = Description: MG91-155 Repeat
  source 1..36: mol_type = unassigned DNA
ggtgttaatcacccagaaatgtagactattaacagg

SEQ ID NO: 6059 - DNA, 38 bp, unidentified
  misc_feature 1..38: note = Description of Unknown: uncultivated organism sequence
  misc_feature 1..38: note = Category: MG91 CRISPR repeat
  misc_feature 1..38: note = Description: MG91-201 Repeat
  source 1..38: mol_type = unassigned DNA
gctgtatatgcctaataaagttagggtactaacaagaa
